(19) United States
(12) Patent Application Publication
(10) Pub. No.: US 2026/0034247 A1
(43) Pub. Date: Feb. 5, 2026

(54) COMPOSITIONS AND METHODS FOR TREATING CEP290-ASSOCIATED DISEASE

(71) Applicant: EDITAS MEDICINE, INC., Cambridge, MA (US)

(72) Inventors: Morgan Lee MAEDER, Newton, MA (US); Rina J. MEPANI, Belmont, CA (US); David A. BUMCROT, Belmont, CA (US); Shen SHEN, Watertown, MA (US); Michael STEFANIDAKIS, Brookline, MA (US)

(73) Assignee: EDITAS MEDICINE, INC., Cambridge, MA (US)

(21) Appl. No.: 18/884,034

(22) Filed: Sep. 12, 2024

Related U.S. Application Data
(63) Continuation of application No. 17/450,544, filed on Oct. 11, 2021, now abandoned.
Application No. 17/450,544 is a continuation of application No. 16/053,763, filed on Aug. 2, 2018, now Pat. No. 11,141,493.
Application No. 16/053,763 is a continuation-in-part of application No. 15/667,603, filed on Aug. 2, 2017, now Pat. No. 11,339,437.
Application No. 15/667,603 is a continuation-in-part of application No. 14/644,181, filed on Mar. 10, 2015, now Pat. No. 9,938,521.
(60) Provisional application No. 61/950,733, filed on Mar. 10, 2014.
(60) Provisional application No. 62/036,576, filed on Aug. 12, 2014.
(60) Provisional application No. 62/370,202, filed on Aug. 2, 2016.
(60) Provisional application No. 62/400,526, filed on Sep. 27, 2016.
(60) Provisional application No. 62/443,568, filed on Jan. 6, 2017.
(60) Provisional application No. 62/503,800, filed on May 9, 2017.
(60) Provisional application No. 62/535,193, filed on Jul. 20, 2017.

(51) Int. Cl. A61K 48/00; A61P 27/02

(52) U.S. Cl. CPC A61K 48/0058; A61K 48/0008; A61K 48/0066; A61K 48/0091; A61P 27/02

(57) ABSTRACT

Compositions and methods for treatment of CEP290 related diseases are disclosed.

### CROSS-REFERENCE TO RELATED APPLICATIONS

[0001] The present application is a continuation of U.S. patent application Ser. No. 17/450,544, filed Oct. 11, 2021, which is a continuation of U.S. patent application Ser. No. 16/053,763, filed Aug. 2, 2018, and issued U.S. Pat. No. 11,141,493 on Oct. 12, 2021, which is a continuation-in-part of U.S. patent application Ser. No. 15/667,603, filed Aug. 2, 2017, and issued as U.S. Pat. No. 11,339,437 on May 24, 2022, which is a continuation-in-part of U.S. patent application Ser. No. 14/644,181, filed Mar. 10, 2015, and issued as U.S. Pat. No. 9,938,521 on Apr. 10, 2018, and claims the benefit of U.S. Provisional Appl. No. 61/950,733, filed Mar. 10, 2014; U.S. Provisional Appl. No. 62/036,576, filed Aug. 12, 2014; U.S. Provisional Appl. No. 62/370,202, filed Aug. 2, 2016; U.S. Provisional Appl. No. 62/400,526, filed Sep. 27, 2016; U.S. Provisional Appl. No. 62/443,568, filed Jan. 6, 2017; U.S. Provisional Appl. No. 62/503,800, filed May 9, 2017; and U.S. Provisional Appl. No. 62/535,193, filed Jul. 20, 2017; the contents of which are hereby incorporated by reference in their entirety.

### SEQUENCE LISTING

[0002] This application contains a ST.26 compliant Sequence Listing, which was submitted in XML format via Patent Center, and is hereby incorporated by reference in its entirety. The XML copy, created on Oct. 24, 2025, is named ReplacementSequenceListing1189458002US13.xml and is 3,508,000 bytes in size.

### TECHNICAL FIELD

[0003] The invention relates to CRISPR/CAS-related methods and components for editing of a target nucleic acid sequence, and applications thereof in connection with Leber's Congenital Amaurosis 10 (LCA10).

### BACKGROUND

[0004] Leber's congenital amaurosis (LCA) is the most severe form of inherited retinal dystrophy, with an onset of disease symptoms in the first years of life (Leber 1869) and an estimated prevalence of approximately 1 in 50,000 worldwide (Koenekoop 2007; Stone 2007). Genetically, LCA is a heterogeneous disease. To date, fifteen genes have been identified with mutations that result in LCA (den Hollander 2008; Estrada-Cuzcano 2011). The CEP290 gene is the most frequently mutated LCA gene accounting for approximately 15% of all cases (Stone 2007; den Hollander 2008; den Hollander 2006; Perrault 2007). Severe mutations in CEP290 have also been reported to cause systemic diseases that are characterized by brain defects, kidney malformations, polydactyly and/or obesity (Baal 2007; den Hollander 2008; Helou 2007; Valente 2006). Mutations of CEP290 are observed in several diseases, including Senior-Loken syndrome, Meckel Gruber syndrome, Bardet-Biedle syndrome, Joubert Syndrome, and Leber Congenital Amaurosis 10 (LCA10). Patients with LCA and early-onset retinal dystrophy often carry hypomorphic CEP290 alleles (Stone 2007; den Hollander 2006; Perrault 2007; Coppieters 2010; Littink 2010).

[0005] LCA, and other retinal dystrophies such as Retinitis Pigmentosa (RP), have long been considered incurable diseases. However, the first phase I/II clinical trials using gene augmentation therapy have led to promising results in a selected group of adult LCA/RP patients with mutations in the RPE65 gene (Bainbridge 2008; Cideciyan 2008; Hauswirth 2008; Maguire 2008). Unilateral subretinal injections of adeno-associated virus particles carrying constructs encoding the wild-type RPE65 cDNA were shown to be safe and moderately effective in some patients, without causing any adverse effects. In a follow-up study including adults and children, visual improvements were more sustained, especially in the children all of whom gained ambulatory vision (Maguire 2009). Although these studies demonstrated the potential to treat LCA using gene augmentation therapy and increased the development of therapeutic strategies for other genetic subtypes of retinal dystrophies (den Hollander 2010), it is hard to control the expression levels of the therapeutic genes when using gene augmentation therapy.

[0006] LCA10, one type of LCA, is an inherited (autosomal recessive) retinal degenerative disease characterized by severe loss of vision at birth. All subjects having LCA10 have had at least one c.2991+1655A to G (adenine to guanine) mutation in the CEP290 gene. Heterozygous nonsense, frameshift, and splice-site mutations have been identified on the remaining allele. A c.2991+1655A to G mutation in the CEP290 gene give rise to a cryptic splice donor cite in intron 26 which results in the inclusion of an aberrant exon of 128 bp in the mutant CEP290 mRNA, and inserts a premature stop codon (P.C998X). The sequence of the cryptic exon contains part of an Alu repeat.

[0007] There are currently no approved therapeutics for LCA10. Despite advances that have been made using gene therapy, there remains a need for therapeutics to treat retinal dystrophies, including LCA10.

### SUMMARY

[0008] The inventors have addressed a key unmet need in the field by providing new and effective means of delivering genome editing systems to the affected tissues of subjects suffering from CEP290 associated diseases and other inherited retinal dystrophies. This disclosure provides nucleic acids and vectors for efficient transduction of genome editing systems in retinal cells and cells in other tissues, as well as methods of using these vectors to treat subjects. These nucleic acids, vectors and methods represent an important step forward in the development of treatments for CEP290 associated diseases.

[0009] In one aspect, the disclosure relates to a method for treating or altering a cell in a subject (e.g., a human subject or an animal subject), that includes administering to the subject a nucleic acid encoding a Cas9 and first and second guide RNAs (gRNAs) targeted to the CEP290 gene of the subject. In certain embodiments, the first and second gRNAs are targeted to one or more target sequences that encompass or are proximal to a CEP290 target position. The first gRNA may include a targeting domain selected from SEQ ID NOs: 389-391 (corresponding RNA sequences in SEQ ID NOs: 530, 468, and 538, respectively), while the second gRNA may include a targeting domain selected from SEQ ID NOs: 388, 392, and 394 (corresponding RNA sequences in SEQ ID NOs: 558, 460, 568, respectively). The Cas9, which may be a modified Cas9 (e.g., a Cas9 engineered to alter PAM specificity, improve fidelity, or to alter or improve another structural or functional aspect of the Cas9), may include one or more of a nuclear localization signal (NLS) and/or a polyadenylation signal. Certain embodiments are characterized by Cas9s that include both a C-terminal and an N-terminal NLS. The Cas9 is encoded, in certain embodiments, by SEQ ID NO: 39, and its expression is optionally driven by one of a CMV, EFS, or hGRK1 promoter, as set out in SEQ ID NOs: 401-403 respectively. The nucleic acid also includes, in various cases, first and second inverted terminal repeat sequences (ITRs).

[0010] Continuing with this aspect of the disclosure, a nucleic acid comprising any or all of the features described above may be administered to the subject via an adeno-associated viral (AAV) vector, such as an AAV5 vector. The vector may be delivered to the retina of the subject (for example, by subretinal injection). Various embodiments of the method may be used in the treatment of human subjects. For example, the methods may be used to treat subjects suffering from a CEP290 associated disease such as LCA10, to restore CEP290 function in a subject in need thereof, and/or to alter a cell in the subject, such as a retinal cell and/or a photoreceptor cell.

[0011] In another aspect, this disclosure relates to a nucleic acid encoding a Cas9, a first gRNA with a targeting domain selected from SEQ ID NOs: 389-391 (corresponding RNA sequences in SEQ ID NOs: 530, 468, and 538, respectively), and a second gRNA with a targeting domain selected from SEQ ID NOs: 388, 392, and 394 (corresponding RNA sequences in SEQ ID NOs: 558, 460, and 568, respectively). The nucleic acid may, in various embodiments, incorporate any or all of the features described above (e.g., the NLS and/or polyadenylation signal; the CMV, EFS or hGRK1 promoter; and/or the ITRs). The nucleic acid may be part of an AAV vector, which vector may be used in medicine, for example to treat a CEP290 associated disease such as LCA10, and/or may be used to edit specific cells including retinal cells, for instance retinal photoreceptor cells. The nucleic acid may also be used for the production of a medicament.

[0012] In yet another aspect, this disclosure relates to a method of treating a subject that includes the step of contacting a retina of the subject with one or more recombinant viral vectors (e.g., AAV vectors) that encode a Cas9 and first and second gRNAs. The first and second gRNAs are adapted to form first and second ribonucleoprotein complexes with the Cas9, and the first and second complexes in turn are adapted to cleave first and second target sequences, respectively, on either side of a CEP290 target position as that term is defined below. This cleavage results in the alteration of the nucleic acid sequence of the CEP290 target position. In some embodiments, the step of contacting the retina with one or more recombinant viral vectors includes administering to the retina of the subject, by subretinal injection, a composition comprising the one or more recombinant viral vectors. The alteration of the nucleic acid sequence of the CEP290 target position can include formation of an indel, deletion of part or all of the CEP290 target position, and/or inversion of a nucleotide sequence in the CEP290 target position. The subject, in certain embodiments, is a primate.

[0013] The genome editing systems, compositions, and methods of the present disclosure can support high levels of productive editing in retinal cells, e.g., in photoreceptor cells. In certain embodiments, 10%, 15%, 20%, or 25% of retinal cells in samples modified according to the methods of this disclosure (e.g., in retinal samples contacted with a genome editing system of this disclosure) comprise a productive alteration of an allele of the CEP290 gene. A productive alteration may include, variously, a deletion and/or inversion of a sequence comprising an IVS26 mutation, or another modification that results in an increase in the expression of functional CEP290 protein in a cell. In certain embodiments, 25%, 30%, 35%, 40%, 45%, 50%, or more than 50% of photoreceptor cells in retinal samples modified according to the methods of this disclosure (e.g., in retinal samples contacted with a genome editing system of this disclosure) comprise a productive alteration of an allele of the CEP290 gene.

[0014] In another aspect, this disclosure relates to a nucleic acid encoding a Cas9 and first and second gRNAs targeted to a CEP290 gene of a subject for use in therapy, e.g. in the treatment of CEP290-associated disease. The CEP290 associated disease may be, in some embodiments, LCA10, and in other embodiments may be selected from the group consisting of Senior-Loken syndrome, Meckel Gruber syndrome, Bardet-Biedle syndrome and Joubert Syndrome. A targeting domain of the first gRNA may comprise a sequence selected from SEQ ID NOs: 389-391 (corresponding RNA sequences in SEQ ID NOs: 530, 468, and 538, respectively), and a targeting domain of the second gRNA may comprise a sequence selected from SEQ ID NOs: 388, 392, and 394, respectively (corresponding RNA sequences in SEQ ID NOs: 558, 460, and 568, respectively). In certain embodiments, the first and second gRNA targeting domains comprise SEQ ID NOs: 389 and 388, respectively. In other embodiments, the first and second gRNA targeting domains comprise the sequences of SEQ ID NOs: 389 and 392, respectively; SEQ ID NOs: 389 and 394, respectively; SEQ ID NOs: 390 and 388, respectively; SEQ ID NOs: 391 and 388, respectively; or SEQ ID NOs: 391 and 392, respectively. In still other embodiments, the first and second targeting domains comprise the sequences of SEQ ID NOs: 390 and 392, respectively; SEQ ID NOs: 390 and 394, respectively; or SEQ ID NOs: 391 and 394, respectively. The gRNAs according to this aspect of the disclosure may be unimolecular, and may comprise RNA sequences according to SEQ ID NOs: 2779 or 2786 (corresponding to the DNA sequences of SEQ ID NOs: 2785 and 2787, respectively). Alternatively, the gRNAs may be two-part modular gRNAs according to either sequence, where the crRNA component comprises the portion of SEQ ID NO: 2785/2779 or 2787/2786 that is underlined below, and the tracrRNA component comprises the portion that is double-underlined below:

DNA:
(SEQ ID NO: 2785)
[N]₁₆₋₂₄GTTTTAGTACTCTGGAAACAGAATCTACTAAAACAAGGCAAA
ATGCCGTGTTTATCTCGTCAACTTGTTGGCGAGATTTTTT
and
RNA:
(SEQ ID NO: 2779)
[N]₁₆₋₂₄GUUUUAGUACUCUGGAAACAGAAUCUACUAAAACAAGGCAAA
AUGCCGUGUUUAUCUCGUCAACUUGUUGGCGAGAUUUUUU.
DNA:
(SEQ ID NO: 2787)
[N]₁₆₋₂₄GTTATAGTACTCTGGAAACAGAATCTACTATAACAAGGCAAA
ATGCCGTGTTTATCTCGTCAACTTGTTGGCGAGATTTTTT
and
RNA:
(SEQ ID NO: 2786)
[N]₁₆₋₂₄GUUAUAGUACUCUGGAAACAGAAUCUACUAUAACAAGGCAAA
AUGCCGUGUUUAUCUCGUCAACUUGUUGGCGAGAUUUUUU.

[0015] Continuing with this aspect of the disclosure, the Cas9 encoded by the nucleic acid is, in certain embodiments, a Staphylococcus aureus Cas9, which may be encoded by a sequence comprising SEQ ID NO: 39, or having at least 80%, 85%, 90%, 95% or 99% sequence identity thereto. The Cas9 encoded by the nucleic acid may comprise the amino acid sequence of SEQ ID NO: 26 or may share at least 80%, 85%, 90%, 95% or 99% sequence identity therewith. The Cas9 may be modified in some instances, for example to include one or more nuclear localization signals (NLSs) (e.g., a C-terminal and an N-terminal NLS) and/or a polyadenylation signal. Cas9 expression may be driven by a promoter sequence such as the promoter sequence comprising SEQ ID NO: 401, the promoter sequence comprising SEQ ID NO: 402, or the promoter sequence comprising SEQ ID NO: 403.

[0016] Staying with this aspect of the disclosure, the promoter sequence for driving the expression of the Cas9 comprises, in certain embodiments, the sequence of a human GRK1 promoter. In other embodiments, the promoter comprises the sequence of a cytomegalovirus (CMV) promoter or an EFS promoter. For example, the nucleic acid may comprise, in various embodiments, (a) a CMV promoter for Cas9 and gRNAs comprising (or differing by no more than 3 nucleotides from) targeting domains according to SEQ ID NOs: 389 and 392, or (b) a CMV promoter for Cas9 and gRNAs comprising targeting domains according to SEQ ID NOs: 389 and 394, or c) a CMV promoter for Cas9 and gRNAs comprising targeting domains according to SEQ ID NOs: 390 and 388, or d) a CMV promoter for Cas9 and gRNAs comprising targeting domains according to SEQ ID NOs: 391 and 388, or e) a CMV promoter for Cas9 and gRNAs comprising targeting domains according to SEQ ID NOs: 391 and 392, or f) an EFS promoter for Cas9 and gRNAs comprising targeting domains according to SEQ ID NOs: 389 and 392, or g) an EFS promoter for Cas9 and gRNAs comprising targeting domains according to SEQ ID NOs: 389 and 394, or h) an EFS promoter for Cas9 and gRNAs comprising targeting domains according to SEQ ID NOs: 390 and 388, or i) an EFS promoter for Cas9 and gRNAs comprising targeting domains according to SEQ ID NOs: 391 and 388, or j) an EFS promoter for Cas9 and gRNAs comprising targeting domains according to SEQ ID NOs: 391 and 392, or k) an hGRK1 promoter for Cas9 and gRNAs comprising targeting domains according to SEQ ID NOs: 389 and 392, or g) an hGRK1promoter for Cas9 and gRNAs comprising targeting domains according to SEQ ID NOs: 389 and 394, or h) an hGRK1promoter for Cas9 and gRNAs comprising targeting domains according to SEQ ID NOs: 390 and 388, or i) an hGRK1 promoter for Cas9 and gRNAs comprising targeting domains according to SEQ ID NOs: 391 and 388, or j) an hGRK1promoter for Cas9 and gRNAs comprising targeting domains according to SEQ ID NOs: 391 and 392. In other embodiments, the nucleic acid comprises a CMV promoter and guide RNA targeting sequences according to SEQ ID NOs: 389 and 388. In still other embodiments, the nucleic acid comprises an hGRK promoter and guide RNA targeting sequences according to SEQ ID NOs: 390 and 392, or it comprises a CMV promoter and guide RNA targeting sequences according to SEQ ID NOs: 390 and 392, or an hGRK promoter and guide RNA targeting sequences according to SEQ ID NOs: 390 and 394, or it comprises a CMV promoter and guide RNA targeting sequences according to SEQ ID NOs: 391 and 394, or an hGRK promoter and guide RNA targeting sequences according to SEQ ID NOs: 391 and 394, or it comprises a CMV promoter and guide RNA targeting sequences according to SEQ ID NOs: 390 and 392. And in further embodiments, the promoter is hGRK or CMV while the first and second gRNA targeting domains comprise the sequences of SEQ ID NOs: 389 and 392, SEQ ID NOs: 389 and 394, SEQ ID NOs: 390 and 388, SEQ ID NOs: 391 and 388, or SEQ ID NOs: 391 and 392.

[0017] In another aspect, the present disclosure relates to adeno-associated virus (AAV) vectors comprising the nucleic acids described above. AAV vectors comprising the foregoing nucleic acids may be administered to a variety of tissues of a subject, though in certain embodiments the AAV vectors are administered to a retina of the subject, and/or are administered by subretinal injection. The AAV vector may comprise an AAV5 capsid.

[0018] An additional aspect of this disclosure relates to a nucleic acid as described above, for delivery via an AAV vector also as described above. The nucleic acid includes in some embodiments, first and second inverted terminal repeat sequences (ITRs), a first guide RNA comprising a targeting domain sequence selected from SEQ ID NOs: 389-391 (corresponding RNA sequences in SEQ ID NOs: 530, 468, and 538, respectively), a second guide RNA comprising a targeting domain sequence selected from SEQ ID NOs: 388, 392, and 394 (corresponding RNA sequences in SEQ ID NOs: 558, 460, and 568, respectively), and a promoter for driving Cas9 expression comprising a sequence selected from SEQ ID NOs: 401-403. In certain embodiments, the nucleic acid includes first and second ITRs and first and second guide RNAs comprising a guide RNA sequence selected from SEQ ID NOs: 2785 and 2787 (e.g., both first and second guide RNAs comprise the sequence of SEQ ID NO: 2787). The nucleic acid may be used in the treatment of human subjects, and/or in the production of a medicament.

[0019] The nucleic acids and vectors according to these aspects of the disclosure may be used in medicine, for instance in the treatment of disease. In some embodiments, they are used in the treatment of a CEP290-associated disease, in the treatment of LCA10, or in the treatment of one or more of the following: Senior-Loken syndrome, Meckel Gruber syndrome, Bardet-Biedle syndrome, and/or Joubert Syndrome. Without wishing to be bound by theory, it is contemplated that the nucleic acids and vectors disclosed herein may be used to treat other inherited retinal diseases by adapting the gRNA targeting domains to target and alter the gene of interest. In certain embodiments, the nucleic acids and vectors according to the disclosure may be used for the treatment of other inherited retinal diseases as set forth in Stone 2017, which is incorporated by reference herein in its entirety. For example, in certain embodiments, the nucleic acids and vectors disclosed herein may be used to treat USH2A-related disorders by including gRNAs comprising targeting domains that alter the USH2A gene. Vectors and nucleic acids according to this disclosure may be administered to the retina of a subject, for instance by subretinal injection.

[0020] This disclosure also relates to recombinant viral vectors comprising the nucleic acids described above, and to the use of such viral vectors in the treatment of disease. In some embodiments, one or more viral vectors encodes a Cas9, a first gRNA and a second gRNA for use in a method of altering a nucleotide sequence of a CEP 290 target position wherein (a) the first and second gRNAs are adapted to form first and second ribonucleoprotein complexes with the Cas9, and (b) the first and second ribonucleoprotein complexes are adapted to cleave first and second cellular nucleic acid sequences on first and second sides of a CEP290 target position, thereby altering a nucleotide sequence of the CEP290 target position. In use, the one or more recombinant viral vectors is contacted to the retina of a subject, for instance by subretinal injection.

[0021] Another aspect of this disclosure relates to AAV vectors, AAV vector genomes and/or nucleic acids that may be carried by AAV vectors, which encode one or more guide RNAs, each comprising a sequence selected from—or having at least 90% sequence identity to—one of SEQ ID NOs: 2785 or 2787, a sequence encoding a Cas9 and a promoter sequence operably coupled to the Cas9 coding sequence, which promoter sequence comprises a sequence selected from—or having at least 90% sequence identity to—one of SEQ ID NOs: 401-403. The Cas9 coding sequence may comprise the sequence of SEQ ID NO: 39, or it may share at least 90% sequence identity therewith. Alternatively or additionally, the Cas9 coding sequence may encode an amino acid sequence comprising SEQ ID NO: 26, or sharing at least 90% sequence identity therewith. In certain embodiments, the AAV vector, vector genome or nucleic acid further comprises one or more of the following: left and right ITR sequences, optionally selected from—or having at least 90% sequence identity to—SEQ ID NOs: 408 and 437, respectively; and one or more U6 promoter sequences operably coupled to the one or more guide RNA sequences. The U6 promoter sequences may comprise, or share at least 90% sequence identity with, SEQ ID NO: 417.

[0022] Methods and compositions discussed herein, provide for treating or delaying the onset or progression of diseases of the eye, e.g., disorders that affect retinal cells, e.g., photoreceptor cells.

[0023] Methods and compositions discussed herein, provide for treating or delaying the onset or progression of Leber's Congenital Amaurosis 10 (LCA10), an inherited retinal degenerative disease characterized by severe loss of vision at birth. LCA10 is caused by a mutation in the CEP290 gene, e.g., a c.2991+1655A to G (adenine to guanine) mutation in the CEP290 gene which gives rise to a cryptic splice site in intron 26. This is a mutation at nucleotide 1655 of intron 26 of CEP290, e.g., an A to G mutation. CEP290 is also known as: CT87; MKS4; POC3; rd16; BBS14; JBTS5; LCA10; NPHP6; SLSN6; and 3H11Ag.

[0024] Methods and compositions discussed herein, provide for treating or delaying the onset or progression of LCA10 by gene editing, e.g., using CRISPR-Cas9 mediated methods to alter a LCA10 target position, as disclosed below.

[0025] “LCA10 target position” as used herein refers to nucleotide 1655 of intron 26 of the CEP290 gene, and the mutation at that site that gives rise to a cryptic splice donor site in intron 26 which results in the inclusion of an aberrant exon of 128 bp (c.2991+1523 to c.2991+1650) in the mutant CEP290 mRNA, and inserts a premature stop codon (p.C998X). The sequence of the cryptic exon contains part of an Alu repeat region. The Alu repeats span from c.2991+1162 to c.2991+1638. In an embodiment, the LCA10 target position is occupied by an adenine (A) to guanine (G) mutation (c.2991+1655A to G).

[0026] In one aspect, methods and compositions discussed herein, provide for altering a LCA10 target position in the CEP290 gene. The methods and compositions described herein introduce one or more breaks near the site of the LCA target position (e.g., c.2991+1655A to G) in at least one allele of the CEP290 gene. Altering the LCA10 target position refers to (1) break-induced introduction of an indel (also referred to herein as NHEJ-mediated introduction of an indel) in close proximity to or including a LCA10 target position (e.g., c.2991+1655A to G), or (2) break-induced deletion (also referred to herein as NHEJ-mediated deletion) of genomic sequence including the mutation at a LCA10 target position (e.g., c.2991+1655A to G). Both approaches give rise to the loss or destruction of the cryptic splice site resulting from the mutation at the LCA10 target position (e.g., c.2991+1655A to G).

[0027] In an embodiment, a single strand break is introduced in close proximity to or at the LCA10 target position (e.g., c.2991+1655A to G) in the CEP290 gene. While not wishing to be bound by theory, it is believed that break-induced indels (e.g., indels created following NHEJ) destroy the cryptic splice site. In an embodiment, the single strand break will be accompanied by an additional single strand break, positioned by a second gRNA molecule.

[0028] In an embodiment, a double strand break is introduced in close proximity to or at the LCA10 target position (e.g., c.2991+1655A to G) in the CEP290 gene. While not wishing to be bound by theory, it is believed that break-induced indels (e.g., indels created following NHEJ) destroy the cryptic splice site. In an embodiment, a double strand break will be accompanied by an additional single strand break may be positioned by a second gRNA molecule. In an embodiment, a double strand break will be accompanied by two additional single strand breaks positioned by a second gRNA molecule and a third gRNA molecule.

[0029] In an embodiment, a pair of single strand breaks is introduced in close proximity to or at the LCA10 target position (e.g., c.2991+1655A to G) in the CEP290 gene. While not wishing to be bound by theory, it is believed that break-induced indels destroy the cryptic splice site. In an embodiment, the pair of single strand breaks will be accompanied by an additional double strand break, positioned by a third gRNA molecule. In an embodiment, the pair of single strand breaks will be accompanied by an additional pair of single strand breaks positioned by a third gRNA molecule and a fourth gRNA molecule.

[0030] In an embodiment, two double strand breaks are introduced to flank the LCA10 target position in the CEP290 gene (one 5′ and the other one 3′ to the mutation at the LCA10 target position, e.g., c.2991+1655A to G) to remove (e.g., delete) the genomic sequence including the mutation at the LCA10 target position. It is contemplated herein that in an embodiment the break-induced deletion of the genomic sequence including the mutation at the LCA10 target position is mediated by NHEJ. In an embodiment, the breaks (i.e., the two double strand breaks) are positioned to avoid unwanted target chromosome elements, such as repeat elements, e.g., an Alu repeat. The breaks, i.e., two double strand breaks, can be positioned upstream and downstream of the LCA10 target position, as discussed herein.

[0031] In an embodiment, one double strand break (either 5′ or 3′ to the mutation at the LCA10 target position, e.g., c.2991+1655A to G) and two single strand breaks (on the other side of the mutation at the LCA10 target position from the double strand break) are introduced to flank the LCA10 target position in the CEP290 gene to remove (e.g., delete) the genomic sequence including the mutation at the LCA10 target position. It is contemplated herein that in an embodiment the break-induced deletion of the genomic sequence including the mutation at the LCA10 target position is mediated by NHEJ. In an embodiment, the breaks (i.e., the double strand break and the two single strand breaks) are positioned to avoid unwanted target chromosome elements, such as repeat elements, e.g., an Alu repeat. The breaks, e.g., one double strand break and two single strand breaks, can be positioned upstream and downstream of the LCA10 target position, as discussed herein.

[0032] In an embodiment, two pairs of single strand breaks (two 5′ and the other two 3′ to the mutation at the LCA10 target position, e.g., c.2991+1655A to G) are introduced to flank the LCA10 target position in the CEP290 gene to remove (e.g., delete) the genomic sequence including the mutation at the LCA10 target position. It is contemplated herein that in an embodiment the break-induced deletion of the genomic sequence including the mutation at the LCA10 target position is mediated by NHEJ. In an embodiment, the breaks (e.g., two pairs of single strand breaks) are positioned to avoid unwanted target chromosome elements, such as repeat elements, e.g., an Alu repeat. The breaks, e.g., two pairs of single strand breaks, can be positioned upstream or downstream of the LCA10 target position, as discussed herein.

[0033] The LCA10 target position may be targeted by cleaving with either a single nuclease or dual nickases, e.g., to induce break-induced indel in close proximity to or including the LCA10 target position or break-induced deletion of genomic sequence including the mutation at the LCA10 target position in the CEP290 gene. The method can include acquiring knowledge of the mutation carried by the subject, e.g., by sequencing the appropriate portion of the CEP290 gene.

[0034] In one aspect, disclosed herein is a gRNA molecule, e.g., an isolated or non-naturally occurring gRNA molecule, comprising a targeting domain which is complementary with a target domain from the CEP290 gene.

[0035] When two or more gRNAs are used to position two or more cleavage events, e.g., double strand or single strand breaks, in a target nucleic acid, it is contemplated that in an embodiment the two or more cleavage events may be made by the same or different Cas9 proteins. For example, when two gRNAs are used to position two double strand breaks, a single Cas9 nuclease may be used to create both double strand breaks. When two or more gRNAs are used to position two or more single stranded breaks (single strand breaks), a single Cas9 nickase may be used to create the two or more single strand breaks. When two or more gRNAs are used to position at least one double strand break and at least one single strand break, two Cas9 proteins may be used, e.g., one Cas9 nuclease and one Cas9 nickase. It is contemplated that in an embodiment when two or more Cas9 proteins are used that the two or more Cas9 proteins may be delivered sequentially to control specificity of a double strand versus a single strand break at the desired position in the target nucleic acid.

[0036] In some embodiments, the targeting domain of the first gRNA molecule and the targeting domain of the second gRNA molecule hybridize to the target domain from the target nucleic acid molecule (i.e., the CEP290 gene) through complementary base pairing to opposite strands of the target nucleic acid molecule. In some embodiments, the first gRNA molecule and the second gRNA molecule are configured such that the PAMs are oriented outward.

[0037] In an embodiment, the targeting domain of a gRNA molecule is configured to avoid unwanted target chromosome elements, such as repeat elements, e.g., an Alu repeat, or the endogenous CEP290 splice sites, in the target domain. The gRNA molecule may be a first, second, third and/or fourth gRNA molecule.

[0038] In an embodiment, the targeting domain of a gRNA molecule is configured to position a cleavage event sufficiently far from a preselected nucleotide, e.g., the nucleotide of a coding region, such that the nucleotide is not altered. In an embodiment, the targeting domain of a gRNA molecule is configured to position an intronic cleavage event sufficiently far from an intron/exon border, or naturally occurring splice signal, to avoid alteration of the exonic sequence or unwanted splicing events. The gRNA molecule may be a first, second, third and/or fourth gRNA molecule, as described herein.

[0039] In an embodiment, the LCA10 target position in the CEP290 gene is targeted. In an embodiment, the targeting domain comprises a sequence that is the same as, or differs by no more than 1, 2, 3, 4, or 5 nucleotides from, a targeting domain sequence from Table 11. In some embodiments, the targeting domain is selected from those in Table 11. For example, in certain embodiments, the targeting domain is:

(SEQ ID NO: 387)
GACACTGCCAATAGGGATAGGT;
(SEQ ID NO: 388)
GTCAAAAGCTACCGGTTACCTG;
(SEQ ID NO: 389)
GTTCTGTCCTCAGTAAAAGGTA;
(SEQ ID NO: 390)
GAATAGTTTGTTCTGGGTAC;
(SEQ ID NO: 391)
GAGAAAGGGATGGGCACTTA;
(SEQ ID NO: 392)
GATGCAGAACTAGTGTAGAC;
(SEQ ID NO: 393)
GTCACATGGGAGTCACAGGG;
or
(SEQ ID NO: 394)
GAGTATCTCCTGTTTGGCA.

[0040] In an embodiment, when two or more gRNAs are used to position two or more breaks, e.g., two or more single strand breaks in the target nucleic acid sequence, each guide RNA is independently selected from one of Table 11. In an embodiment, the two or more gRNAs or targeting domains are selected from one or more of the pairs of gRNAs or targeting domains described herein, e.g., as indicated in Table 11. In an embodiment, when two or more gRNAs are used to position four breaks, e.g., four single strand breaks in the target nucleic acid sequence, each guide RNA is independently selected from one of Table 11.

[0041] In an embodiment, the LCA10 target position in the CEP290 gene is targeted. In an embodiment, the targeting domain comprises a sequence that is the same as, or differs by no more than 1, 2, 3, 4, or 5 nucleotides from, a targeting domain sequence from Table 2A-2D. In some embodiments, the targeting domain is selected from those in Table 2A-2D. For example, in certain embodiments, the targeting domain is:

(SEQ ID NO: 395)
GAGAUACUCACAAUUACAAC;
or
(SEQ ID NO: 396)
GAUACUCACAAUUACAACUG.

[0042] In an embodiment, when two or more gRNAs are used to position two or more breaks, e.g., two or more single strand breaks in the target nucleic acid sequence, each guide RNA is independently selected from one of Tables 2A-2D. In an embodiment, when two or more gRNAs are used to position four breaks, e.g., four single strand breaks in the target nucleic acid sequence, each guide RNA is independently selected from one of Tables 2A-2D.

[0043] In an embodiment, the LCA10 target position in the CEP290 gene is targeted. In an embodiment, the targeting domain comprises a sequence that is the same as, or differs by no more than 1, 2, 3, 4, or 5 nucleotides from, a targeting domain sequence from Tables 3A-3C. In some embodiments, the targeting domain is selected from those in Tables 3A-3C. For example, in certain embodiments, the targeting domain is:

(SEQ ID NO: 395)
GAGAUACUCACAAUUACAAC;
or
(SEQ ID NO: 397)
GAUACUCACAAUUACAA.

[0044] In an embodiment, when two or more gRNAs are used to position two or more breaks, e.g., two or more single stranded breaks in the target nucleic acid sequence, each guide RNA is independently selected from one of Tables 3A-3C. In an embodiment, when two or more gRNAs are used to position four breaks, e.g., four single strand breaks in the target nucleic acid sequence, each guide RNA is independently selected from one of Tables 3A-3C.

[0045] In an embodiment, the LCA10 target position in the CEP290 gene is targeted. In an embodiment, the targeting domain comprises a sequence that is the same as, or differs by no more than 1, 2, 3, 4, or 5 nucleotides from, a targeting domain sequence from Tables 7A-7D. In some embodiments, the targeting domain is selected from those in Tables 7A-7D. For example, in certain embodiments, the targeting domain is:

(SEQ ID NO: 398)
GCACCUGGCCCCAGUUGUAAUU.

[0046] In an embodiment, when two or more gRNAs are used to position two or more breaks, e.g., two or more single stranded breaks in the target nucleic acid sequence, each guide RNA is independently selected from one of Tables 7A-7D. In an embodiment, when two or more gRNAs are used to position four breaks, e.g., four single strand breaks in the target nucleic acid sequence, each guide RNA is independently selected from one of Tables 7A-7D.

[0047] In an embodiment, the LCA10 target position in the CEP290 gene is targeted. In an embodiment, the targeting domain comprises a sequence that is the same as, or differs by no more than 1, 2, 3, 4, or 5 nucleotides from, a targeting domain sequence from Tables 4A-4D. In some embodiments, the targeting domain is selected from those in Tables 4A-4D. For example, in certain embodiments, the targeting domain is:

(SEQ ID NO: 457)
GCUACCGGUUACCUGAA;
(SEQ ID NO: 458)
GCAGAACUAGUGUAGAC;
(SEQ ID NO: 459)
GUUGAGUAUCUCCUGUU;
(SEQ ID NO: 460)
GAUGCAGAACUAGUGUAGAC;
or
(SEQ ID NO: 461)
GCUUGAACUCUGUGCCAAAC.

[0048] In an embodiment, when two or more gRNAs are used to position two or more breaks, e.g., two or more single stranded breaks in the target nucleic acid sequence, each guide RNA is independently selected from one of Tables 4A-4D. In an embodiment, when two or more gRNAs are used to position four breaks, e.g., four single strand breaks in the target nucleic acid sequence, each guide RNA is independently selected from one of Tables 4A-4D.

[0049] In an embodiment, the LCA10 target position in the CEP290 gene is targeted. In an embodiment, the targeting domain comprises a sequence that is the same as, or differs by no more than 1, 2, 3, 4, or 5 nucleotides from, a targeting domain sequence from Tables 8A-8D. In some embodiments, the targeting domain is selected from those in Tables 8A-8D. For example, in certain embodiments, the targeting domain is:

(SEQ ID NO: 457)
GCUACCGGUUACCUGAA;
(SEQ ID NO: 458)
GCAGAACUAGUGUAGAC;
(SEQ ID NO: 459)
GUUGAGUAUCUCCUGUU;
(SEQ ID NO: 460)
GAUGCAGAACUAGUGUAGAC;
(SEQ ID NO: 461)
GCUUGAACUCUGUGCCAAAC;
(SEQ ID NO: 462)
GAAAGAUGAAAAAUACUCUU;
(SEQ ID NO: 463)
GAAAUAGAUGUAGAUUG;
(SEQ ID NO: 464)
GAAAUAUUAAGGGCUCUUCC;
(SEQ ID NO: 465)
GAACAAAAGCCAGGGACCAU;
(SEQ ID NO: 466)
GAACUCUAUACCUUUUACUG;
(SEQ ID NO: 467)
GAAGAAUGGAAUAGAUAAUA;
(SEQ ID NO: 468)
GAAUAGUUUGUUCUGGGUAC;
(SEQ ID NO: 469)
GAAUGGAAUAGAUAAUA;
(SEQ ID NO: 470)
GAAUUUACAGAGUGCAUCCA;
(SEQ ID NO: 471)
GAGAAAAAGGAGCAUGAAAC;
(SEQ ID NO: 472)
GAGAGCCACAGUGCAUG;
(SEQ ID NO: 473)
GAGGUAGAAUCAAGAAG;
(SEQ ID NO: 474)
GAGUGCAUCCAUGGUCC;
(SEQ ID NO: 475)
GAUAACUACAAAGGGUC;
(SEQ ID NO: 476)
GAUAGAGACAGGAAUAA;
(SEQ ID NO: 477)
GAUGAAAAAUACUCUUU;
(SEQ ID NO: 478)
GAUGACAUGAGGUAAGU;
(SEQ ID NO: 479)
GCAUGUGGUGUCAAAUA;
(SEQ ID NO: 480)
GCCUGAACAAGUUUUGAAAC;
(SEQ ID NO: 481)
GCUCUUUUCUAUAUAUA;
(SEQ ID NO: 482)
GCUUUUGACAGUUUUUAAGG;
(SEQ ID NO: 483)
GCUUUUGUUCCUUGGAA;
(SEQ ID NO: 484)
GGAACAAAAGCCAGGGACCA;
(SEQ ID NO: 485)
GGACUUGACUUUUACCCUUC;
(SEQ ID NO: 486)
GGAGAAUAGUUUGUUCU;
(SEQ ID NO: 487)
GGAGUCACAUGGGAGUCACA;
(SEQ ID NO: 488)
GGAUAGGACAGAGGACA;
(SEQ ID NO: 489)
GGCUGUAAGAUAACUACAAA;
(SEQ ID NO: 490)
GGGAGAAUAGUUUGUUC;
(SEQ ID NO: 491)
GGGAGUCACAUGGGAGUCAC;
(SEQ ID NO: 492)
GGGCUCUUCCUGGACCA;
(SEQ ID NO: 493)
GGGUACAGGGGUAAGAGAAA;
(SEQ ID NO: 494)
GGUCCCUGGCUUUUGUUCCU;
(SEQ ID NO: 495)
GUAAAGGUUCAUGAGACUAG;
(SEQ ID NO: 496)
GUAACAUAAUCACCUCUCUU;
(SEQ ID NO: 497)
GUAAGACUGGAGAUAGAGAC;
(SEQ ID NO: 498)
GUACAGGGGUAAGAGAA;
(SEQ ID NO: 499)
GUAGCUUUUGACAGUUUUUA;
(SEQ ID NO: 500)
GUCACAUGGGAGUCACA;
(SEQ ID NO: 501)
GUGGAGAGCCACAGUGCAUG;
(SEQ ID NO: 502)
GUUACAAUCUGUGAAUA;
(SEQ ID NO: 503)
GUUCUGUCCUCAGUAAA;
(SEQ ID NO: 504)
GUUUAGAAUGAUCAUUCUUG;
(SEQ ID NO: 505)
GUUUGUUCUGGGUACAG;
(SEQ ID NO: 506)
UAAAAACUGUCAAAAGCUAC;
(SEQ ID NO: 507)
UAAAAGGUAUAGAGUUCAAG;
(SEQ ID NO: 508)
UAAAUCAUGCAAGUGACCUA;
or
(SEQ ID NO: 509)
UAAGAUAACUACAAAGGGUC.

[0050] In an embodiment, when two or more gRNAs are used to position two or more breaks, e.g., two or more single stranded breaks in the target nucleic acid sequence, each guide RNA is independently selected from one of Tables 8A-8D. In an embodiment, when two or more gRNAs are used to position four breaks, e.g., four single strand breaks in the target nucleic acid sequence, each guide RNA is independently selected from one of Tables 8A-8D.

[0051] In an embodiment, the LCA10 target position in the CEP290 gene is targeted. In an embodiment, the targeting domain comprises a sequence that is the same as, or differs by no more than 1, 2, 3, 4, or 5 nucleotides from, a targeting domain sequence from Table 5A-5D. In some embodiments, the targeting domain is selected from those in Table 5A-5D. For example, in certain embodiments, the targeting domain is:

(SEQ ID NO: 510)
GAAUCCUGAAAGCUACU.

[0052] In an embodiment, when two or more gRNAs are used to position two or more breaks, e.g., two or more single stranded breaks in the target nucleic acid sequence, each guide RNA is independently selected from one of Tables 5A-5D. In an embodiment, when two or more gRNAs are used to position four breaks, e.g., four single strand breaks in the target nucleic acid sequence, each guide RNA is independently selected from one of Tables 5A-5D.

[0053] In an embodiment, the LCA10 target position in the CEP290 gene is targeted. In an embodiment, the targeting domain comprises a sequence that is the same as, or differs by no more than 1, 2, 3, 4, or 5 nucleotides from, a targeting domain sequence from Tables 9A-SE. In some embodiments, the targeting domain is selected from those in Tables 9A-SE. For example, in certain embodiments, the targeting domain is:

(SEQ ID NO: 460)
GAUGCAGAACUAGUGUAGAC;
(SEQ ID NO: 468)
GAAUAGUUUGUUCUGGGUAC;
(SEQ ID NO: 480)
GCCUGAACAAGUUUUGAAAC;
(SEQ ID NO: 494)
GGUCCCUGGCUUUUGUUCCU;
(SEQ ID NO: 497)
GUAAGACUGGAGAUAGAGAC;
(SEQ ID NO: 511)
GCUAAAUCAUGCAAGUGACCUAAG;
(SEQ ID NO: 512)
GGUCACUUGCAUGAUUUAG;
(SEQ ID NO: 513)
GUCACUUGCAUGAUUUAG;
(SEQ ID NO: 514)
GCCUAGGACUUUCUAAUGCUGGA;
(SEQ ID NO: 515)
GGACUUUCUAAUGCUGGA;
(SEQ ID NO: 516)
GGGACCAUGGGAGAAUAGUUUGUU;
(SEQ ID NO: 517)
GGACCAUGGGAGAAUAGUUUGUU;
(SEQ ID NO: 518)
GACCAUGGGAGAAUAGUUUGUU;
(SEQ ID NO: 519)
GGUCCCUGGCUUUUGUUCCUUGGA;
(SEQ ID NO: 520)
GUCCCUGGCUUUUGUUCCUUGGA;
(SEQ ID NO: 521)
GAAAACGUUGUUCUGAGUAGCUUU;
(SEQ ID NO: 522)
GUUGUUCUGAGUAGCUUU;
(SEQ ID NO: 523)
GUCCCUGGCUUUUGUUCCU;
(SEQ ID NO: 524)
GACAUCUUGUGGAUAAUGUAUCA;
(SEQ ID NO: 525)
GUCCUAGGCAAGAGACAUCUU;
(SEQ ID NO: 526)
GCCAGCAAAAGCUUUUGAGCUAA;
(SEQ ID NO: 527)
GCAAAAGCUUUUGAGCUAA;
(SEQ ID NO: 528)
GAUCUUAUUCUACUCCUGUGA;
(SEQ ID NO: 529)
GCUUUCAGGAUUCCUACUAAAUU;
(SEQ ID NO: 530)
GUUCUGUCCUCAGUAAAAGGUA;
(SEQ ID NO: 531)
GAACAACGUUUUCAUUUA;
(SEQ ID NO: 532)
GUAGAAUAUCAUAAGUUACAAUCU;
(SEQ ID NO: 533)
GAAUAUCAUAAGUUACAAUCU;
(SEQ ID NO: 534)
GUGGCUGUAAGAUAACUACA;
(SEQ ID NO: 535)
GGCUGUAAGAUAACUACA;
(SEQ ID NO: 536)
GUUUAACGUUAUCAUUUUCCCA;
(SEQ ID NO: 537)
GUAAGAGAAAGGGAUGGGCACUUA;
(SEQ ID NO: 538)
GAGAAAGGGAUGGGCACUUA;
(SEQ ID NO: 539)
GAAAGGGAUGGGCACUUA;
(SEQ ID NO: 540)
GUAAAUGAAAACGUUGUU;
(SEQ ID NO: 541)
GAUAAACAUGACUCAUAAUUUAGU;
(SEQ ID NO: 542)
GGAACAAAAGCCAGGGACCAUGG;
(SEQ ID NO: 543)
GAACAAAAGCCAGGGACCAUGG;
(SEQ ID NO: 544)
GGGAGAAUAGUUUGUUCUGGGUAC;
(SEQ ID NO: 545)
GGAGAAUAGUUUGUUCUGGGUAC;
(SEQ ID NO: 546)
GAGAAUAGUUUGUUCUGGGUAC;
(SEQ ID NO: 547)
GAAAUAGAGGCUUAUGGAUU;
(SEQ ID NO: 548)
GUUCUGGGUACAGGGGUAAGAGAA;
(SEQ ID NO: 549)
GGGUACAGGGGUAAGAGAA;
(SEQ ID NO: 550)
GGUACAGGGGUAAGAGAA;
(SEQ ID NO: 551)
GUAAAUUCUCAUCAUUUUUUAUUG;
(SEQ ID NO: 552)
GGAGAGGAUAGGACAGAGGACAUG;
(SEQ ID NO: 553)
GAGAGGAUAGGACAGAGGACAUG;
(SEQ ID NO: 554)
GAGGAUAGGACAGAGGACAUG;
(SEQ ID NO: 555)
GGAUAGGACAGAGGACAUG;
(SEQ ID NO: 556)
GAUAGGACAGAGGACAUG;
(SEQ ID NO: 557)
GAAUAAAUGUAGAAUUUUAAUG;
(SEQ ID NO: 558)
GUCAAAAGCUACCGGUUACCUG;
(SEQ ID NO: 559)
GUUUUUAAGGCGGGGAGUCACAU;
(SEQ ID NO: 560)
GUCUUACAUCCUCCUUACUGCCAC;
(SEQ ID NO: 561)
GAGUCACAGGGUAGGAUUCAUGUU;
(SEQ ID NO: 562)
GUCACAGGGUAGGAUUCAUGUU;
(SEQ ID NO: 563)
GGCACAGAGUUCAAGCUAAUACAU;
(SEQ ID NO: 564)
GCACAGAGUUCAAGCUAAUACAU;
(SEQ ID NO: 565)
GAGUUCAAGCUAAUACAU;
(SEQ ID NO: 566)
GUGUUGAGUAUCUCCUGUUUGGCA;
(SEQ ID NO: 567)
GUUGAGUAUCUCCUGUUUGGCA;
(SEQ ID NO: 568)
GAGUAUCUCCUGUUUGGCA;
(SEQ ID NO: 569)
GAAAAUCAGAUUUCAUGUGUG;
(SEQ ID NO: 570)
GCCACAAGAAUGAUCAUUCUAAAC;
(SEQ ID NO: 571)
GGCGGGGAGUCACAUGGGAGUCA;
(SEQ ID NO: 572)
GCGGGGAGUCACAUGGGAGUCA;
(SEQ ID NO: 573)
GGGGAGUCACAUGGGAGUCA;
(SEQ ID NO: 574)
GGGAGUCACAUGGGAGUCA;
(SEQ ID NO: 575)
GGAGUCACAUGGGAGUCA;
(SEQ ID NO: 576)
GCUUUUGACAGUUUUUAAGGCG;
(SEQ ID NO: 577)
GAUCAUUCUUGUGGCAGUAAG;
(SEQ ID NO: 578)
GAGCAAGAGAUGAACUAG;
(SEQ ID NO: 579)
GUAGAUUGAGGUAGAAUCAAGAA;
(SEQ ID NO: 580)
GAUUGAGGUAGAAUCAAGAA;
(SEQ ID NO: 581)
GGAUGUAAGACUGGAGAUAGAGAC;
(SEQ ID NO: 582)
GAUGUAAGACUGGAGAUAGAGAC;
(SEQ ID NO: 583)
GGGAGUCACAUGGGAGUCACAGGG;
(SEQ ID NO: 584)
GGAGUCACAUGGGAGUCACAGGG;
(SEQ ID NO: 585)
GAGUCACAUGGGAGUCACAGGG;
(SEQ ID NO: 586)
GUCACAUGGGAGUCACAGGG;
(SEQ ID NO: 587)
GUUUACAUAUCUGUCUUCCUUAA;
or
(SEQ ID NO: 588)
GAUUUCAUGUGUGAAGAA.

[0054] In an embodiment, when two or more gRNAs are used to position two or more breaks, e.g., two or more single stranded breaks in the target nucleic acid sequence, each guide RNA is independently selected from one of Tables 9A-9E. In an embodiment, when two or more gRNAs are used to position four breaks, e.g., four single strand breaks in the target nucleic acid sequence, each guide RNA is independently selected from one of Tables 9A-9E.

[0055] In an embodiment, the LCA10 target position in the CEP290 gene is targeted. In an embodiment, the targeting domain comprises a sequence that is the same as, or differs by no more than 1, 2, 3, 4, or 5 nucleotides from, a targeting domain sequence from Tables 6A-6B. In some embodiments, the targeting domain is selected from those in Tables 6A-6B. For example, in certain embodiments, the targeting domain is:

(SEQ ID NO: 589)
GAGUUCAAGCUAAUACAUGA;
(SEQ ID NO: 590)
GUUGUUCUGAGUAGCUU;
or
(SEQ ID NO: 591)
GGCAAAAGCAGCAGAAAGCA.

[0056] In an embodiment, when two or more gRNAs are used to position two or more breaks, e.g., two or more single stranded breaks in the target nucleic acid sequence, each guide RNA is independently selected from one of Tables 6A-6B. In an embodiment, when two or more gRNAs are used to position four breaks, e.g., four single strand breaks in the target nucleic acid sequence, each guide RNA is independently selected from one of Tables 6A-6B.

[0057] In an embodiment, the LCA10 target position in the CEP290 gene is targeted. In an embodiment, the targeting domain comprises a sequence that is the same as, or differs by no more than 1, 2, 3, 4, or 5 nucleotides from, a targeting domain sequence from Tables 10A-10B. In some embodiments, the targeting domain is selected from those in Tables 10A-10B. For example, in certain embodiments, the targeting domain is:

(SEQ ID NO: 589)
GAGUUCAAGCUAAUACAUGA;
(SEQ ID NO: 590)
GUUGUUCUGAGUAGCUU;
(SEQ ID NO: 591)
GGCAAAAGCAGCAGAAAGCA;
(SEQ ID NO: 592)
GUGGCUGAAUGACUUCU;
or
(SEQ ID NO: 593)
GACUAGAGGUCACGAAA.

[0058] In an embodiment, when two or more gRNAs are used to position two or more breaks, e.g., two or more single stranded breaks in the target nucleic acid sequence, each guide RNA is independently selected from one of Tables 10A-10B. In an embodiment, when two or more gRNAs are used to position four breaks, e.g., four single strand breaks in the target nucleic acid sequence, each guide RNA is independently selected from one of Tables 10A-10B.

[0059] In an embodiment, the gRNA, e.g., a gRNA comprising a targeting domain, which is complementary with a target domain from the CEP290 gene, is a modular gRNA. In other embodiments, the gRNA is a chimeric gRNA.

[0060] In an embodiment, when two gRNAs are used to position two breaks, e.g., two single strand breaks, in the target nucleic acid sequence, each guide RNA is independently selected from one or more of Tables 2A-2D, Tables 3A-3C, Tables 4A-4D, Tables 5A-5D, Tables 6A-6B, Tables 7A-7D, Tables 8A-8D, Tables 9A-9E, Tables 10A-10B, or Table 11.

[0061] In an embodiment, the targeting domain which is complementary with a target domain from the CEP290 gene comprises 16 or more nucleotides in length. In an embodiment, the targeting domain which is complementary with a target domain from the CEP290 gene is 16 nucleotides or more in length. In an embodiment, the targeting domain is 16 nucleotides in length. In an embodiment, the targeting domain is 17 nucleotides in length. In an embodiment, the targeting domain is 18 nucleotides in length. In an embodiment, the targeting domain is 19 nucleotides in length. In an embodiment, the targeting domain is 20 nucleotides in length. In an embodiment, the targeting domain is 21 nucleotides in length. In an embodiment, the targeting domain is 22 nucleotides in length. In an embodiment, the targeting domain is 23 nucleotides in length. In an embodiment, the targeting domain is 24 nucleotides in length. In an embodiment, the targeting domain is 25 nucleotides in length. In an embodiment, the targeting domain is 26 nucleotides in length.

[0062] In an embodiment, the targeting domain comprises 16 nucleotides.

[0063] In an embodiment, the targeting domain comprises 17 nucleotides.

[0064] In an embodiment, the targeting domain comprises 18 nucleotides.

[0065] In an embodiment, the targeting domain comprises 19 nucleotides.

[0066] In an embodiment, the targeting domain comprises 20 nucleotides.

[0067] In an embodiment, the targeting domain comprises 21 nucleotides.

[0068] In an embodiment, the targeting domain comprises 22 nucleotides.

[0069] In an embodiment, the targeting domain comprises 23 nucleotides.

[0070] In an embodiment, the targeting domain comprises 24 nucleotides.

[0071] In an embodiment, the targeting domain comprises 25 nucleotides.

[0072] In an embodiment, the targeting domain comprises 26 nucleotides.

[0073] A gRNA as described herein may comprise from 5′ to 3′: a targeting domain (comprising a “core domain”, and optionally a “secondary domain”); a first complementarity domain; a linking domain; a second complementarity domain; a proximal domain; and a tail domain. In some embodiments, the proximal domain and tail domain are taken together as a single domain.

[0074] In an embodiment, a gRNA comprises a linking domain of no more than 25 nucleotides in length; a proximal and tail domain, that taken together, are at least 20 nucleotides in length; and a targeting domain of equal to or greater than 16, 17, 18, 19, 20, 21, 22, 23, 24, 25 or 26 nucleotides in length.

[0075] In another embodiment, a gRNA comprises a linking domain of no more than 25 nucleotides in length; a proximal and tail domain, that taken together, are at least 30 nucleotides in length; and a targeting domain of equal to or greater than 16, 17, 18, 19, 20, 21, 22, 23, 24, 25 or 26 nucleotides in length.

[0076] In another embodiment, a gRNA comprises a linking domain of no more than 25 nucleotides in length; a proximal and tail domain, that taken together, are at least 30 nucleotides in length; and a targeting domain of equal to or greater than 16, 17, 18, 19, 20, 21, 22, 23, 24, 25 or 26 nucleotides in length.

[0077] In another embodiment, a gRNA comprises a linking domain of no more than 25 nucleotides in length; a proximal and tail domain, that taken together, are at least 40 nucleotides in length; and a targeting domain of equal to or greater than 16, 17, 18, 19, 20, 21, 22, 23, 24, 25 or 26 nucleotides in length.

[0078] A cleavage event, e.g., a double strand or single strand break, is generated by a Cas9 molecule. The Cas9 molecule may be an enzymatically active Cas9 (eaCas9) molecule, e.g., an eaCas9 molecule that forms a double strand break in a target nucleic acid or an eaCas9 molecule forms a single strand break in a target nucleic acid (e.g., a nickase molecule).

[0079] In an embodiment, the eaCas9 molecule catalyzes a double strand break.

[0080] In some embodiments, the eaCas9 molecule comprises HNH-like domain cleavage activity but has no, or no significant, N-terminal RuvC-like domain cleavage activity. In this case, the eaCas9 molecule is an HNH-like domain nickase, e.g., the eaCas9 molecule comprises a mutation at D10, e.g., D10A. In other embodiments, the eaCas9 molecule comprises N-terminal RuvC-like domain cleavage activity but has no, or no significant, HNH-like domain cleavage activity. In an embodiment, the eaCas9 molecule is an N-terminal RuvC-like domain nickase, e.g., the eaCas9 molecule comprises a mutation at H840, e.g., H840A. In an embodiment, the eaCas9 molecule is an N-terminal RuvC-like domain nickase, e.g., the eaCas9 molecule comprises a mutation at H863, e.g., H863A.

[0081] In an embodiment, a single strand break is formed in the strand of the target nucleic acid to which the targeting domain of said gRNA is complementary. In another embodiment, a single strand break is formed in the strand of the target nucleic acid other than the strand to which the targeting domain of said gRNA is complementary.

[0082] In another aspect, disclosed herein is a nucleic acid, e.g., an isolated or non-naturally occurring nucleic acid, e.g., DNA, that comprises (a) a sequence that encodes a gRNA molecule comprising a targeting domain that is complementary with a target domain in CEP290 gene as disclosed herein.

[0083] In an embodiment, the nucleic acid encodes a gRNA molecule, e.g., the first gRNA molecule, comprising a targeting domain comprising a sequence that is the same as, or differs by no more than 1, 2, 3, 4, or 5 nucleotides from, a targeting domain sequence from any one of Tables 2A-2D, Tables 3A-3C, Tables 4A-4D, Tables 5A-5D, Tables 6A-6B, Tables 7A-7D, Tables 8A-8D, Tables 9A-9E, Tables 10A-10B, or Table 11. In an embodiment, the nucleic acid encodes a gRNA molecule comprising a targeting domain that is selected from those in Tables 2A-2D, Tables 3A-3C, Tables 4A-4D, Tables 5A-5D, Tables 6A-6B, Tables 7A-7D, Tables 8A-8D, Tables 9A-9E, Tables 10A-10B, or Table 11.

[0084] In an embodiment, the nucleic acid encodes a modular gRNA, e.g., one or more nucleic acids encode a modular gRNA. In other embodiments, the nucleic acid encodes a chimeric gRNA. The nucleic acid may encode a gRNA, e.g., the first gRNA molecule, comprising a targeting domain comprising 16 nucleotides or more in length. In one embodiment, the nucleic acid encodes a gRNA, e.g., the first gRNA molecule, comprising a targeting domain that is 16 nucleotides in length. In other embodiments, the nucleic acid encodes a gRNA, e.g., the first gRNA molecule, comprising a targeting domain that is 17 nucleotides in length. In still other embodiments, the nucleic acid encodes a gRNA, e.g., the first gRNA molecule, comprising a targeting domain that is 18 nucleotides in length. In still other embodiments, the nucleic acid encodes a gRNA, e.g., the first gRNA molecule, comprising a targeting domain that is 19 nucleotides in length. In still other embodiments, the nucleic acid encodes a gRNA, e.g., the first gRNA molecule, comprising a targeting domain that is 20 nucleotides in length. In still other embodiments, the nucleic acid encodes a gRNA, e.g., the first gRNA molecule, comprising a targeting domain that is 21 nucleotides in length. In still other embodiments, the nucleic acid encodes a gRNA, e.g., the first gRNA molecule, comprising a targeting domain that is 22 nucleotides in length. In still other embodiments, the nucleic acid encodes a gRNA, e.g., the first gRNA molecule, comprising a targeting domain that is 23 nucleotides in length. In still other embodiments, the nucleic acid encodes a gRNA, e.g., the first gRNA molecule, comprising a targeting domain that is 24 nucleotides in length. In still other embodiments, the nucleic acid encodes a gRNA, e.g., the first gRNA molecule, comprising a targeting domain that is 25 nucleotides in length. In still other embodiments, the nucleic acid encodes a gRNA, e.g., the first gRNA molecule, comprising a targeting domain that is 26 nucleotides in length.

[0085] In an embodiment, a nucleic acid encodes a gRNA comprising from 5′ to 3′: a targeting domain (comprising a “core domain”, and optionally a “secondary domain”); a first complementarity domain; a linking domain; a second complementarity domain; a proximal domain; and a tail domain. In some embodiments, the proximal domain and tail domain are taken together as a single domain.

[0086] In an embodiment, a nucleic acid encodes a gRNA e.g., the first gRNA molecule, comprising a linking domain of no more than 25 nucleotides in length; a proximal and tail domain, that taken together, are at least 20 nucleotides in length; and a targeting domain of equal to or greater than 16, 17, 18, 19, 20, 21, 22, 23, 24, 25 or 26 nucleotides in length.

[0087] In an embodiment, a nucleic acid encodes a gRNA e.g., the first gRNA molecule, comprising a linking domain of no more than 25 nucleotides in length; a proximal and tail domain, that taken together, are at least 30 nucleotides in length; and a targeting domain of equal to or greater than 16, 17, 18, 19, 20, 21, 22, 23, 24, 25 or 26 nucleotides in length.

[0088] In an embodiment, a nucleic acid encodes a gRNA e.g., the first gRNA molecule, comprising a linking domain of no more than 25 nucleotides in length; a proximal and tail domain, that taken together, are at least 30 nucleotides in length; and a targeting domain of equal to or greater than 16, 17, 18, 19, 20, 21, 22, 23, 24, 25 or 26 nucleotides in length.

[0089] In an embodiment, a nucleic acid encodes a gRNA comprising e.g., the first gRNA molecule, a linking domain of no more than 25 nucleotides in length; a proximal and tail domain, that taken together, are at least 40 nucleotides in length; and a targeting domain of equal to or greater than 16, 17, 18, 19, 20, 21, 22, 23, 24, 25 or 26 nucleotides in length.

[0090] In an embodiment, a nucleic acid comprises (a) a sequence that encodes a gRNA molecule comprising a targeting domain that is complementary with a target domain in the CEP290 gene as disclosed herein, and further comprises (b) a sequence that encodes a Cas9 molecule.

[0091] The Cas9 molecule may be a nickase molecule, a enzymatically activating Cas9 (eaCas9) molecule, e.g., an eaCas9 molecule that forms a double strand break in a target nucleic acid and an eaCas9 molecule forms a single strand break in a target nucleic acid. In an embodiment, a single strand break is formed in the strand of the target nucleic acid to which the targeting domain of said gRNA is complementary. In another embodiment, a single strand break is formed in the strand of the target nucleic acid other than the strand to which the targeting domain of said gRNA is complementary.

[0092] In an embodiment, the eaCas9 molecule catalyzes a double strand break.

[0093] In some embodiments, the eaCas9 molecule comprises HNH-like domain cleavage activity but has no, or no significant, N-terminal RuvC-like domain cleavage activity. In other embodiments, the said eaCas9 molecule is an HNH-like domain nickase, e.g., the eaCas9 molecule comprises a mutation at D10, e.g., D10A. In other embodiments, the eaCas9 molecule comprises N-terminal RuvC-like domain cleavage activity but has no, or no significant, HNH-like domain cleavage activity. In another embodiment, the eaCas9 molecule is an N-terminal RuvC-like domain nickase, e.g., the eaCas9 molecule comprises a mutation at H840, e.g., H840A. In another embodiment, the eaCas9 molecule is an N-terminal RuvC-like domain nickase, e.g., the eaCas9 molecule comprises a mutation at H863, e.g., H863A.

[0094] A nucleic acid disclosed herein may comprise (a) a sequence that encodes a gRNA molecule comprising a targeting domain that is complementary with a target domain in the CEP290 gene as disclosed herein; and (b) a sequence that encodes a Cas9 molecule.

[0095] A nucleic acid disclosed herein may comprise (a) a sequence that encodes a gRNA molecule comprising a targeting domain that is complementary with a target domain in the CEP290 gene as disclosed herein; (b) a sequence that encodes a Cas9 molecule; and further comprises (c)(i) a sequence that encodes a second gRNA molecule described herein having a targeting domain that is complementary to a second target domain of the CEP290 gene, and optionally, (ii) a sequence that encodes a third gRNA molecule described herein having a targeting domain that is complementary to a third target domain of the CEP290 gene; and optionally, (iii) a sequence that encodes a fourth gRNA molecule described herein having a targeting domain that is complementary to a fourth target domain of the CEP290 gene.

[0096] In an embodiment, a nucleic acid encodes a second gRNA molecule comprising a targeting domain configured to provide a cleavage event, e.g., a double strand break or a single strand break, sufficiently close to a LCA10 target position in the CEP290 gene to allow alteration, e.g., alteration associated with NHEJ, of the LCA10 target position, either alone or in combination with the break positioned by said first gRNA molecule.

[0097] In an embodiment, a nucleic acid encodes a third gRNA molecule comprising a targeting domain configured to provide a cleavage event, e.g., a double strand break or a single strand break, sufficiently close to a LCA10 target position in the CEP290 gene to allow alteration, e.g., alteration associated with NHEJ, either alone or in combination with the break positioned by the first and/or second gRNA molecule.

[0098] In an embodiment, a nucleic acid encodes a fourth gRNA molecule comprising a targeting domain configured to provide a cleavage event, e.g., a double strand break or a single strand break, sufficiently close to a LCA10 target position in the CEP290 gene to allow alteration, e.g., alteration associated with NHEJ, either alone or in combination with the break positioned by the first gRNA molecule, the second gRNA molecule and/or the third gRNA molecule.

[0099] In an embodiment, a nucleic acid encodes a second gRNA molecule comprising a targeting domain configured to provide a cleavage event, e.g., a double strand break or a single strand break, in combination with the break position by said first gRNA molecule, sufficiently close to a LCA10 target position in the CEP290 gene to allow alteration, e.g., alteration associated with NHEJ, of the a LCA10 target position in the CEP290 gene, either alone or in combination with the break positioned by said first gRNA molecule.

[0100] In an embodiment, a nucleic acid encodes a third gRNA molecule comprising a targeting domain configured to provide a cleavage event, e.g., a double strand break or a single strand break, in combination with the break position by said first and/or second gRNA molecule sufficiently close to a LCA10 target position in the CEP290 gene to allow alteration, e.g., alteration associated with NHEJ, either alone or in combination with the break positioned by the first and/or second gRNA molecule.

[0101] In an embodiment, a nucleic acid encodes a fourth gRNA molecule comprising a targeting domain configured to provide a cleavage event, e.g., a double strand break or a single strand break, in combination with the break positioned by the first gRNA molecule, the second gRNA molecule and/or the third gRNA molecule, sufficiently close to a LCA10 target position in the CEP290 gene to allow alteration, e.g., alteration associated with NHEJ, either alone or in combination with the break positioned by the first gRNA molecule, the second gRNA molecule and/or the third gRNA molecule.

[0102] In an embodiment, the nucleic acid encodes a second gRNA molecule. The second gRNA is selected to target the LCA10 target position. Optionally, the nucleic acid may encode a third gRNA, and further optionally, the nucleic acid may encode a fourth gRNA molecule.

[0103] In an embodiment, the nucleic acid encodes a second gRNA molecule comprising a targeting domain comprising a sequence that is the same as, or differs by no more than 1, 2, 3, 4, or 5 nucleotides from, a targeting domain sequence from one of Tables 2A-2D, Tables 3A-3C, Tables 4A-4D, Tables 5A-5D, Tables 6A-6B, Tables 7A-7D, Tables 8A-8D, Tables 9A-9E, Tables 10A-10B, or Table 11. In an embodiment, the nucleic acid encodes a second gRNA molecule comprising a targeting domain selected from those in Tables 2A-2D, Tables 3A-3C, Tables 4A-4D, Tables 5A-5D, Tables 6A-6B, Tables 7A-7D, Tables 8A-8D, Tables 9A-9E, Tables 10A-10B, or Table 11. In an embodiment, when a third or fourth gRNA molecule are present, the third and fourth gRNA molecules may independently comprise a targeting domain comprising a sequence that is the same as, or differs by no more than 1, 2, 3, 4, or 5 nucleotides from, a targeting domain sequence from one of Tables 2A-2D, Tables 3A-3C, Tables 4A-4D, Tables 5A-5D, Tables 6A-6B, Tables 7A-7D, Tables 8A-8D, Tables 9A-9E, Tables 10A-10B, or Table 11. In a further embodiment, when a third or fourth gRNA molecule are present, the third and fourth gRNA molecules may independently comprise a targeting domain selected from those in Tables 2A-2D, Tables 3A-3C, Tables 4A-4D, Tables 5A-5D, Tables 6A-6B, Tables 7A-7D, Tables 8A-8D, Tables 9A-9E, Tables 10A-10B, or Table 11.

[0104] In an embodiment, the nucleic acid encodes a second gRNA which is a modular gRNA, e.g., wherein one or more nucleic acid molecules encode a modular gRNA. In other embodiments, the nucleic acid encoding a second gRNA is a chimeric gRNA. In other embodiments, when a nucleic acid encodes a third or fourth gRNA, the third and fourth gRNA may be a modular gRNA or a chimeric gRNA. When multiple gRNAs are used, any combination of modular or chimeric gRNAs may be used.

[0105] A nucleic acid may encode a second, a third, and/or a fourth gRNA, each independently, comprising a targeting domain comprising 16 nucleotides or more in length. In an embodiment, the nucleic acid encodes a second gRNA comprising a targeting domain that is 16 nucleotides in length. In other embodiments, the nucleic acid encodes a second gRNA comprising a targeting domain that is 17 nucleotides in length. In still other embodiments, the nucleic acid encodes a second gRNA comprising a targeting domain that is 18 nucleotides in length. In still other embodiments, the nucleic acid encodes a second gRNA comprising a targeting domain that is 19 nucleotides in length. In still other embodiments, the nucleic acid encodes a second gRNA comprising a targeting domain that is 20 nucleotides in length. In still other embodiments, the nucleic acid encodes a second gRNA comprising a targeting domain that is 21 nucleotides in length. In still other embodiments, the nucleic acid encodes a second gRNA comprising a targeting domain that is 22 nucleotides in length. In still other embodiments, the nucleic acid encodes a second gRNA comprising a targeting domain that is 23 nucleotides in length. In still other embodiments, the nucleic acid encodes a second gRNA comprising a targeting domain that is 24 nucleotides in length. In still other embodiments, the nucleic acid encodes a second gRNA comprising a targeting domain that is 25 nucleotides in length. In still other embodiments, the nucleic acid encodes a second gRNA comprising a targeting domain that is 26 nucleotides in length.

[0106] In an embodiment, the targeting domain comprises 16 nucleotides.

[0107] In an embodiment, the targeting domain comprises 17 nucleotides.

[0108] In an embodiment, the targeting domain comprises 18 nucleotides.

[0109] In an embodiment, the targeting domain comprises 19 nucleotides.

[0110] In an embodiment, the targeting domain comprises 20 nucleotides.

[0111] In an embodiment, the targeting domain comprises 21 nucleotides.

[0112] In an embodiment, the targeting domain comprises 22 nucleotides.

[0113] In an embodiment, the targeting domain comprises 23 nucleotides.

[0114] In an embodiment, the targeting domain comprises 24 nucleotides.

[0115] In an embodiment, the targeting domain comprises 25 nucleotides.

[0116] In an embodiment, the targeting domain comprises 26 nucleotides.

[0117] In an embodiment, a nucleic acid encodes a second, a third, and/or a fourth gRNA, each independently, comprising from 5′ to 3′: a targeting domain (comprising a “core domain”, and optionally a “secondary domain”); a first complementarity domain; a linking domain; a second complementarity domain; a proximal domain; and a tail domain. In some embodiments, the proximal domain and tail domain are taken together as a single domain.

[0118] In an embodiment, a nucleic acid encodes a second, a third, and/or a fourth gRNA, each independently, comprising a linking domain of no more than 25 nucleotides in length; a proximal and tail domain, that taken together, are at least 20 nucleotides in length; and a targeting domain of equal to or greater than 16, 17, 18, 19, 20, 21, 22, 23, 24, 25 or 26 nucleotides in length.

[0119] In an embodiment, a nucleic acid encodes a second, a third, and/or a fourth gRNA, each independently, comprising a linking domain of no more than 25 nucleotides in length; a proximal and tail domain, that taken together, are at least 30 nucleotides in length; and a targeting domain of equal to or greater than 16, 17, 18, 19, 20, 21, 22, 23, 24, 25 or 26 nucleotides in length.

[0120] In an embodiment, a nucleic acid encodes a second, a third, and/or a fourth gRNA, each independently, comprising a linking domain of no more than 25 nucleotides in length; a proximal and tail domain, that taken together, are at least 30 nucleotides in length; and a targeting domain of equal to or greater than 16, 17, 18, 19, 20, 21, 22, 23, 24, 25 or 26 nucleotides in length.

[0121] In an embodiment, a nucleic acid encodes a second, a third, and/or a fourth gRNA, each independently, comprising a linking domain of no more than 25 nucleotides in length; a proximal and tail domain, that taken together, are at least 40 nucleotides in length; and a targeting domain of equal to or greater than 16, 17, 18, 19, 20, 21, 22, 23, 24, 25 or 26 nucleotides in length.

[0122] In some embodiments, when the CEP290 gene is altered, e.g., by NHEJ, the nucleic acid encodes (a) a sequence that encodes a gRNA molecule comprising a targeting domain that is complementary with a target domain in the CEP290 gene as disclosed herein; (b) a sequence that encodes a Cas9 molecule; optionally, (c)(i) a sequence that encodes a second gRNA molecule described herein having a targeting domain that is complementary to a second target domain of the CEP290 gene, and further optionally, (ii) a sequence that encodes a third gRNA molecule described herein having a targeting domain that is complementary to a third target domain of the CEP290 gene; and still further optionally, (iii) a sequence that encodes a fourth gRNA molecule described herein having a targeting domain that is complementary to a fourth target domain of the CEP290 gene.

[0123] As described above, a nucleic acid may comprise (a) a sequence encoding a gRNA molecule comprising a targeting domain that is complementary with a target domain in the CEP290, and (b) a sequence encoding a Cas9 molecule. In some embodiments, (a) and (b) are present on the same nucleic acid molecule, e.g., the same vector, e.g., the same viral vector, e.g., the same adeno-associated virus (AAV) vector. In an embodiment, the nucleic acid molecule is an AAV vector, e.g., an AAV vector described herein. Exemplary AAV vectors that may be used in any of the described compositions and methods include an AAV1 vector, a modified AAV1 vector, an AAV2 vector, a modified AAV2 vector, an AAV3 vector, a modified AAV3 vector, an AAV4 vector, a modified AAV4 vector, an AAV5 vector, a modified AAV5 vector, an AAV6 vector, a modified AAV6 vector, an AAV7 vector, a modified AAV7 vector, an AAV8 vector, an AAV9 vector, an AAV.rh10 vector, a modified AAV.rh10 vector, an AAV.rh32/33 vector, a modified AAV.rh32/33 vector, an AAV.rh43 vector, a modified AAV.rh43 vector, an AAV.rh64R1 vector, and a modified AAV.rh64R1 vector.

[0124] In other embodiments, (a) is present on a first nucleic acid molecule, e.g. a first vector, e.g., a first viral vector, e.g., a first AAV vector; and (b) is present on a second nucleic acid molecule, e.g., a second vector, e.g., a second vector, e.g., a second AAV vector. The first and second nucleic acid molecules may be AAV vectors, e.g., the AAV vectors described herein.

[0125] In other embodiments, the nucleic acid may further comprise (c)(i) a sequence that encodes a second gRNA molecule as described herein. In some embodiments, the nucleic acid comprises (a), (b) and (c)(i). Each of (a) and (c)(i) may be present on the same nucleic acid molecule, e.g., the same vector, e.g., the same viral vector, e.g., the same adeno-associated virus (AAV) vector. In an embodiment, the nucleic acid molecule is an AAV vector, e.g., an AAV vectors described herein.

[0126] In other embodiments, (a) and (c)(i) are on different vectors. For example, (a) may be present on a first nucleic acid molecule, e.g. a first vector, e.g., a first viral vector, e.g., a first AAV vector; and (c)(i) may be present on a second nucleic acid molecule, e.g., a second vector, e.g., a second vector, e.g., a second AAV vector. In an embodiment, the first and second nucleic acid molecules are AAV vectors, e.g., the AAV vectors described herein.

[0127] In another embodiment, each of (a), (b), and (c)(i) are present on the same nucleic acid molecule, e.g., the same vector, e.g., the same viral vector, e.g., an AAV vector. In an embodiment, the nucleic acid molecule is an AAV vector. In an alternate embodiment, one of (a), (b), and (c)(i) is encoded on a first nucleic acid molecule, e.g., a first vector, e.g., a first viral vector, e.g., a first AAV vector; and a second and third of (a), (b), and (c)(i) is encoded on a second nucleic acid molecule, e.g., a second vector, e.g., a second vector, e.g., a second AAV vector. The first and second nucleic acid molecule may be AAV vectors, e.g., the AAV vectors described herein.

[0128] In an embodiment, (a) is present on a first nucleic acid molecule, e.g., a first vector, e.g., a first viral vector, a first AAV vector; and (b) and (c)(i) are present on a second nucleic acid molecule, e.g., a second vector, e.g., a second vector, e.g., a second AAV vector. The first and second nucleic acid molecule may be AAV vectors, e.g., the AAV vectors described herein.

[0129] In other embodiments, (b) is present on a first nucleic acid molecule, e.g., a first vector, e.g., a first viral vector, e.g., a first AAV vector; and (a) and (c)(i) are present on a second nucleic acid molecule, e.g., a second vector, e.g., a second vector, e.g., a second AAV vector. The first and second nucleic acid molecule may be AAV vectors, e.g., the AAV vectors described herein.

[0130] In other embodiments, (c)(i) is present on a first nucleic acid molecule, e.g., a first vector, e.g., a first viral vector, e.g., a first AAV vector; and (b) and (a) are present on a second nucleic acid molecule, e.g., a second vector, e.g., a second vector, e.g., a second AAV vector. The first and second nucleic acid molecule may be AAV vectors, e.g., the AAV vectors described herein.

[0131] In another embodiment, each of (a), (b) and (c)(i) are present on different nucleic acid molecules, e.g., different vectors, e.g., different viral vectors, e.g., different AAV vector. For example, (a) may be on a first nucleic acid molecule, (b) on a second nucleic acid molecule, and (c)(i) on a third nucleic acid molecule. The first, second and third nucleic acid molecule may be AAV vectors, e.g., the AAV vectors described herein.

[0132] In another embodiment, when a third and/or fourth gRNA molecule are present, each of (a), (b), (c)(i), (c)(ii) and (c)(iii) may be present on the same nucleic acid molecule, e.g., the same vector, e.g., the same viral vector, e.g., an AAV vector. In an embodiment, the nucleic acid molecule is an AAV vector, e.g., an AAV vector. In an alternate embodiment, each of (a), (b), (c)(i), (c)(ii) and (c)(iii) may be present on the different nucleic acid molecules, e.g., different vectors, e.g., the different viral vectors, e.g., different AAV vectors. In further embodiments, each of (a), (b), (c)(i), (c)(ii) and (c)(iii) may be present on more than one nucleic acid molecule, but fewer than five nucleic acid molecules, e.g., AAV vectors, e.g., the AAV vectors described herein.

[0133] The nucleic acids described herein may comprise a promoter operably linked to the sequence that encodes the gRNA molecule of (a), e.g., a promoter described herein, e.g., a promoter described in Table 20. The nucleic acid may further comprise a second promoter operably linked to the sequence that encodes the second, third and/or fourth gRNA molecule of (c), e.g., a promoter described herein. The promoter and second promoter differ from one another. In some embodiments, the promoter and second promoter are the same.

[0134] The nucleic acids described herein may further comprise a promoter operably linked to the sequence that encodes the Cas9 molecule of (b), e.g., a promoter described herein, e.g., a promoter described in Table 20.

[0135] In another aspect, disclosed herein is a composition comprising (a) a gRNA molecule comprising a targeting domain that is complementary with a target domain in the CEP290 gene, as described herein. The composition of (a) may further comprise (b) a Cas9 molecule, e.g., a Cas9 molecule as described herein. A composition of (a) and (b) may further comprise (c) a second, third and/or fourth gRNA molecule, e.g., a second, third and/or fourth gRNA molecule described herein.

[0136] In another aspect, methods and compositions discussed herein, provide for treating or delaying the onset or progression of LCA10 by altering the LCA10 target position in the CEP290 gene.

[0137] In another aspect, disclosed herein is a method of altering a cell, e.g., altering the structure, e.g., altering the sequence, of a target nucleic acid of a cell, comprising contacting said cell with: (a) a gRNA that targets the CEP290 gene, e.g., a gRNA as described herein; (b) a Cas9 molecule, e.g., a Cas9 molecule as described herein; and optionally, (c) a second, third and/or fourth gRNA that targets CEP290 gene, e.g., a gRNA as described herein.

[0138] In some embodiments, the method comprises contacting said cell with (a) and (b).

[0139] In some embodiments, the method comprises contacting said cell with (a), (b), and (c). The gRNA of (a) may be selected from any of Tables 2A-2D, Tables 3A-3C, Tables 4A-4D, Tables 5A-5D, Tables 6A-6B, Tables 7A-7D, Tables 8A-8D, Tables 9A-9E, Tables 10A-10B, or Table 11, or a gRNA that differs by no more than 1, 2, 3, 4, or 5 nucleotides from, a targeting domain sequence from any of Tables 2A-2D, Tables 3A-3C, Tables 4A-4D, Tables 5A-5D, Tables 6A-6B, Tables 7A-7D, Tables 8A-8D, Tables 9A-9E, Tables 10A-10B, or Table 11. The gRNA of (c) may be selected from any of Tables 2A-2D, Tables 3A-3C, Tables 4A-4D, Tables 5A-5D, Tables 6A-6B, Tables 7A-7D, Tables 8A-8D, Tables 9A-9E, Tables 10A-10B, or Table 11, or a gRNA that differs by no more than 1, 2, 3, 4, or 5 nucleotides from, a targeting domain sequence from any of Tables 2A-2D, Tables 3A-3C, Tables 4A-4D, Tables 5A-5D, Tables 6A-6B, Tables 7A-7D, Tables 8A-8D, Tables 9A-9E, Tables 10A-10B, or Table 11.

[0140] In some embodiments, the method comprises contacting a cell from a subject suffering from or likely to develop LCA10. The cell may be from a subject having a mutation at a LCA10 target position.

[0141] In some embodiments, the cell being contacted in the disclosed method is a photoreceptor cell. The contacting may be performed ex vivo and the contacted cell may be returned to the subject's body after the contacting step. In other embodiments, the contacting step may be performed in vivo.

[0142] In some embodiments, the method of altering a cell as described herein comprises acquiring knowledge of the presence of a LCA10 target position in said cell, prior to the contacting step. Acquiring knowledge of the presence of a LCA10 target position in the cell may be by sequencing the CEP290 gene, or a portion of the CEP290 gene.

[0143] In some embodiments, the contacting step of the method comprises contacting the cell with a nucleic acid, e.g., a vector, e.g., an AAV vector, e.g., an AAV vector described herein, that expresses at least one of (a), (b), and (c). In some embodiments, the contacting step of the method comprises contacting the cell with a nucleic acid, e.g., a vector, e.g., an AAV vector, that expresses each of (a), (b), and (c). In another embodiment, the contacting step of the method comprises delivering to the cell a Cas9 molecule of (b) and a nucleic acid which encodes a gRNA (a) and optionally, a second gRNA (c)(i) (and further optionally, a third gRNA (c)(iv) and/or fourth gRNA (c)(iii)).

[0144] In an embodiment, contacting comprises contacting the cell with a nucleic acid, e.g., a vector, e.g., an AAV vector, e.g., an AAV1 vector, a modified AAV1 vector, an AAV2 vector, a modified AAV2 vector, an AAV3 vector, a modified AAV3 vector, an AAV4 vector, a modified AAV4 vector, an AAV5 vector, a modified AAV5 vector, an AAV6 vector, a modified AAV6 vector, an AAV7 vector, a modified AAV7 vector, an AAV8 vector, an AAV9 vector, an AAV.rh10 vector, a modified AAV.rh10 vector, an AAV.rh32/33 vector, a modified AAV.rh32/33 vector, an AAV.rh43vector, a modified AAV.rh43vector, an AAV.rh64R1vector, and a modified AAV.rh64R1vector, e.g., an AAV vector described herein.

[0145] In an embodiment, contacting comprises delivering to said cell said Cas9 molecule of (b), as a protein or an mRNA, and a nucleic acid which encodes and (a) and optionally (c).

[0146] In an embodiment, contacting comprises delivering to said cell said Cas9 molecule of (b), as a protein or an mRNA, said gRNA of (a), as an RNA, and optionally said second gRNA of (c), as an RNA.

[0147] In an embodiment, contacting comprises delivering to said cell said gRNA of (a) as an RNA, optionally said second gRNA of (c) as an RNA, and a nucleic acid that encodes the Cas9 molecule of (b).

[0148] In another aspect, disclosed herein is a method of treating, or preventing a subject suffering from developing, LCA10, e.g., by altering the structure, e.g., sequence, of a target nucleic acid of the subject, comprising contacting the subject (or a cell from the subject) with:
[0149] (a) a gRNA that targets the CEP290 gene, e.g., a gRNA disclosed herein;
[0150] (b) a Cas9 molecule, e.g., a Cas9 molecule disclosed herein; and
[0151] optionally, (c)(i) a second gRNA that targets the CEP290 gene, e.g., a second gRNA disclosed herein, and
[0152] further optionally, (c)(ii) a third gRNA, and still further optionally, (c)(iii) a fourth gRNA that target the CEP290, e.g., a third and fourth gRNA disclosed herein.

[0153] In some embodiments, contacting comprises contacting with (a) and (b).

[0154] In some embodiments, contacting comprises contacting with (a), (b), and (c)(i).

[0155] In some embodiments, contacting comprises contacting with (a), (b), (c)(i) and (c)(ii).

[0156] In some embodiments, contacting comprises contacting with (a), (b), (c)(i), (c)(ii) and (c)(iii).

[0157] The gRNA of (a) or (c) (e.g., (c)(i), (c)(ii), or (c)(iii)) may be independently selected from any of Tables 2A-2D, Tables 3A-3C, Tables 4A-4D, Tables 5A-5D, Tables 6A-6B, Tables 7A-7D, Tables 8A-8D, Tables 9A-9E, Tables 10A-10B, or Table 11, or a gRNA that differs by no more than 1, 2, 3, 4, or 5 nucleotides from, a targeting domain sequence from any of Tables 2A-2D, Tables 3A-3C, Tables 4A-4D, Tables 5A-5D, Tables 6A-6B, Tables 7A-7D, Tables 8A-8D, Tables 9A-9E, Tables 10A-10B, or Table 11.

[0158] In an embodiment, said subject is suffering from, or likely to develop LCA10. In an embodiment, said subject has a mutation at a LCA10 target position.

[0159] In an embodiment, the method comprises acquiring knowledge of the presence of a mutation at a LCA10 target position in said subject.

[0160] In an embodiment, the method comprises acquiring knowledge of the presence of a mutation a LCA10 target position in said subject by sequencing the CEP290 gene or a portion of the CEP290 gene.

[0161] In an embodiment, the method comprises altering the LCA10 target position in the CEP290 gene.

[0162] In an embodiment, a cell of said subject is contacted ex vivo with (a), (b) and optionally (c). In an embodiment, said cell is returned to the subject's body.

[0163] In an embodiment, the method comprises introducing a cell into said subject's body, wherein said cell subject was contacted ex vivo with (a), (b) and optionally (c).

[0164] In an embodiment, the method comprises said contacting is performed in vivo. In an embodiment, the method comprises sub-retinal delivery. In an embodiment, contacting comprises sub-retinal injection. In an embodiment, contacting comprises intra-vitreal injection.

[0165] In an embodiment, contacting comprises contacting the subject with a nucleic acid, e.g., a vector, e.g., an AAV vector described herein, e.g., a nucleic acid that encodes at least one of (a), (b), and optionally (c).

[0166] In an embodiment, contacting comprises delivering to said subject said Cas9 molecule of (b), as a protein or mRNA, and a nucleic acid which encodes and (a) and optionally (c).

[0167] In an embodiment, contacting comprises delivering to said subject said Cas9 molecule of (b), as a protein or mRNA, said gRNA of (a), as an RNA, and optionally said second gRNA of (c), as an RNA.

[0168] In an embodiment, contacting comprises delivering to said subject said gRNA of (a), as an RNA, optionally said second gRNA of (c), as an RNA, and a nucleic acid that encodes the Cas9 molecule of (b).

[0169] In another aspect, disclosed herein is a reaction mixture comprising a gRNA, a nucleic acid, or a composition described herein, and a cell, e.g., a cell from a subject having, or likely to develop LCA10, or a subject having a mutation at a LCA10 target position.

[0170] In another aspect, disclosed herein is a kit comprising, (a) a gRNA molecule described herein, or a nucleic acid that encodes said gRNA, and one or more of the following:
[0171] (b) a Cas9 molecule, e.g., a Cas9 molecule described herein, or a nucleic acid or mRNA that encodes the Cas9;
[0172] (c)(i) a second gRNA molecule, e.g., a second gRNA molecule described herein or a nucleic acid that encodes (c)(i);
[0173] (c)(ii) a third gRNA molecule, e.g., a second gRNA molecule described herein or a nucleic acid that encodes (c)(ii); or
[0174] (c)(iii) a fourth gRNA molecule, e.g., a second gRNA molecule described herein or a nucleic acid that encodes (c)(iii).

[0175] In an embodiment, the kit comprises nucleic acid, e.g., an AAV vector, e.g., an AAV vector described herein, that encodes one or more of (a), (b), (c)(i), (c)(ii), and (c)(iii). In an embodiment, the kit further comprises a governing gRNA molecule, or a nucleic acid that encodes a governing gRNA molecule.

[0176] In yet another aspect, disclosed herein is a gRNA molecule, e.g., a gRNA molecule described herein, for use in treating LCA10 in a subject, e.g., in accordance with a method of treating LCA10 as described herein.

[0177] In an embodiment, the gRNA molecule in used in combination with a Cas9 molecule, e.g., a Cas9 molecule described herein. Additionally or alternatively, in an embodiment, the gRNA molecule is used in combination with a second, third and/or fourth gRNA molecule, e.g., a second, third and/or fourth gRNA molecule described herein.

[0178] In still another aspect, disclosed herein is use of a gRNA molecule, e.g., a gRNA molecule described herein, in the manufacture of a medicament for treating LCA10 in a subject, e.g., in accordance with a method of treating LCA10 as described herein.

[0179] In an embodiment, the medicament comprises a Cas9 molecule, e.g., a Cas9 molecule described herein. Additionally or alternatively, in an embodiment, the medicament comprises a second, third and/or fourth gRNA molecule, e.g., a second, third and/or fourth gRNA molecule described herein.

[0180] In one aspect, disclosed herein is a recombinant adenovirus-associated virus (AAV) genome comprising the following components:

[chemical structure]

[0181] wherein the left ITR component comprises, or consists of, a nucleotide sequence that is the same as, differs by no more than 1, 2, 3, 4, 5, 6, 7, 8, 9, or 10 nucleotides from, or has at least 90%, 92%, 94%, 96%, 98%, or 99% homology with, any of the left ITR nucleotide sequences disclosed in Table 25, or any of the nucleotide sequences of SEQ ID NOs: 407-415;
[0182] wherein the spacer 1 component comprises, or consists of, a nucleotide sequence having 0 to 150 nucleotides in length, e.g., SEQ ID NO: 416;
[0183] wherein the PIII promoter component comprises, or consists of, an RNA polymerase III promoter sequence;
[0184] wherein the gRNA component comprises a targeting domain and a scaffold domain,
   [0185] wherein the targeting domain is 16-26 nucleotides in length, and comprises, or consists of, a targeting domain sequence disclosed herein, e.g., in any of Tables 2A-2D, Tables 3A-3C, Tables 4A-4D, Tables 5A-5D, Tables 6A-6B, Tables 7A-7D, Tables 8A-8D, Tables 9A-9E, Tables 10A-10B, or Table 11; and
   [0186] wherein the scaffold domain (also referred to as a tracr domain in FIGS. 20A-25F) comprises, or consists of, a nucleotide sequence that is the same as, differs by no more than 1, 2, 3, 4, or 5 nucleotides from, or has at least has at least 90%, 92%, 94%, 96%, 98%, or 99% homology with, a nucleotide sequence of SEQ ID NO: 418;
[0187] wherein the spacer 2 component comprises, or consists of, a nucleotide sequence having 0 to 150 nucleotides in length e.g., SEQ ID NO: 419;
[0188] wherein the PII promoter component comprises, or consists of, a polymerase II promoter sequence, e.g., a constitutive or tissue specific promoter, e.g., a promoter disclosed in Table 20;
[0189] wherein the N-ter NLS component comprises, or consists of, a nucleotide sequence that is the same as, differs by no more than 1, 2, 3, 4, or 5 nucleotides from, or has at least has at least 90%, 92%, 94%, 96%, 98%, or 99% homology with, the nucleotide sequence of SEQ ID NO: 420 or a nucleotide sequence that encodes the amino acid sequence of SEQ ID NO: 434;
[0190] wherein the Cas9 component comprises, or consists of, a nucleotide sequence that is the same as, differs by no more than 1, 2, 3, 4, 5, 6, 7, 8, 9, or 10 nucleotides from, or has at least 90%, 92%, 94%, 96%, 98%, or 99% homology with, the nucleotide sequence of SEQ ID NO: 421 or a nucleotide sequence that encodes the amino acid sequence of SEQ ID NO: 26;
[0191] wherein the C-ter NLS component comprises, or consists of, a nucleotide sequence that is the same as, differs by no more than 1, 2, 3, 4, or 5 nucleotides from, or has at least has at least 90%, 92%, 94%, 96%, 98%, or 99% homology with, the nucleotide sequence of SEQ ID NO: 422 or a nucleotide sequence that encodes the amino acid sequence of SEQ ID NO: 434;
[0192] wherein the poly(A) signal component comprises, or consists of, a nucleotide sequence that is the same as, differs by no more than 1, 2, 3, 4, 5, 6, 7, 8, 9, or 10 nucleotides from, or has at least has at least 90%, 92%, 94%, 96%, 98%, or 99% homology with, any of the nucleotide sequences disclosed in Table 27, or any of the nucleotide sequences of SEQ ID NOs: 424, 455 or 456;
[0193] wherein the spacer 3 component comprises, or consists of, a nucleotide sequence having 0 to 150 nucleotides in length, e.g., SEQ ID NO: 425; and
[0194] wherein the right ITR component comprises, or consists of, a nucleotide sequence that is the same as, differs by no more than 1, 2, 3, 4, 5, 6, 7, 8, 9, or 10 nucleotides from, or has at least has at least 90%, 92%, 94%, 96%, 98%, or 99% homology with, any of the right ITR nucleotide sequences disclosed in Table 25, or any of the nucleotide sequences of SEQ ID NOs: 436-444.

[0195] In an embodiment, the left ITR component comprises, or consists of, a nucleotide sequence that is the same as any of the nucleotide sequences of SEQ ID NOS: 407-415.

[0196] In an embodiment, the spacer 1 component comprises, or consists of, a nucleotide sequence that is the same as the nucleotide sequence of SEQ ID NO: 416.

[0197] In an embodiment, the PIII promoter component is a U6 promoter component.

[0198] In an embodiment, the U6 promoter component comprises, or consists of, a nucleotide sequence that is the same as, differs by no more than 1, 2, 3, 4, 5, 6, 7, 8, 9, or 10 nucleotides from, or has at least has at least 90%, 92%, 94%, 96%, 98%, or 99% homology with, the nucleotide sequence of SEQ ID NO: 417;

[0199] In an embodiment, the U6 promoter component comprises, or consists of, a nucleotide sequence that is the same as the nucleotide sequence of SEQ ID NO: 417.

[0200] In an embodiment, the PIII promoter component is an H1 promoter component that comprises an H1 promoter sequence.

[0201] In an embodiment, the PIII promoter component is a tRNA promoter component that comprises a tRNA promoter sequence.

[0202] In an embodiment, the targeting domain comprises, or consists of, a nucleotide sequence that is the same as a nucleotide sequence selected from Table 11.

[0203] In an embodiment, the gRNA scaffold domain comprises, or consists of, a nucleotide sequence that is the same as the nucleotide sequence of SEQ ID NO: 418.

[0204] In an embodiment, the spacer 2 component comprises, or consists of, a nucleotide sequence that is the same as the nucleotide sequence of SEQ ID NO: 419;

[0205] In an embodiment, the PII promoter component is a CMV promoter component, and comprises, or consists of, a nucleotide sequence that is the same as, differs by no more than 1, 2, 3, 4, 5, 6, 7, 8, 9, or 10 nucleotides from, or has at least has at least 90%, 92%, 94%, 96%, 98%, or 99% homology with, the nucleotide sequence of SEQ ID NO: 401. In an embodiment, the PII promoter comprises, or consists of, a nucleotide sequence that is the same as the nucleotide sequence of SEQ ID NO: 401.

[0206] In an embodiment, the PII promoter component is an EFS promoter component, and comprises, or consists of, a nucleotide sequence that is the same as, differs by no more than 1, 2, 3, 4, 5, 6, 7, 8, 9, or 10 nucleotides from, or has at least has at least 90%, 92%, 94%, 96%, 98%, or 99% homology with, the nucleotide sequence of SEQ ID NO: 402. In an embodiment, the PII promoter comprises, or consists of, a nucleotide sequence that is the same as the nucleotide sequence of SEQ ID NO: 402.

[0207] In an embodiment, the PII promoter component is a GRK1 promoter (e.g., a human GRK1 promoter) component, and comprises, or consists of, a nucleotide sequence that is the same as, differs by no more than 1, 2, 3, 4, 5, 6, 7, 8, 9, or 10 nucleotides from, or has at least has at least 90%, 92%, 94%, 96%, 98%, or 99% homology with, the nucleotide sequence of SEQ ID NO: 403. In an embodiment, the PII promoter comprises, or consists of, a nucleotide sequence that is the same as the nucleotide sequence of SEQ ID NO: 403.

[0208] In an embodiment, the PII promoter component is a CRX promoter (e.g., a human CRX promoter) component, and comprises, or consists of, a nucleotide sequence that is the same as, differs by no more than 1, 2, 3, 4, 5, 6, 7, 8, 9, or 10 nucleotides from, or has at least has at least 90%, 92%, 94%, 96%, 98%, or 99% homology with, the nucleotide sequence of SEQ ID NO: 404. In an embodiment, the PII promoter comprises, or consists of, a nucleotide sequence that is the same as the nucleotide sequence of SEQ ID NO: 404.

[0209] In an embodiment, the PII promoter component is an NRL promoter (e.g., a human NRL promoter) component, and comprises, or consists of, a nucleotide sequence that is the same as, differs by no more than 1, 2, 3, 4, 5, 6, 7, 8, 9, or 10 nucleotides from, or has at least has at least 90%, 92%, 94%, 96%, 98%, or 99% homology with, the nucleotide sequence of SEQ ID NO: 405. In an embodiment, the PII promoter comprises, or consists of, a nucleotide sequence that is the same as the nucleotide sequence of SEQ ID NO: 405.

[0210] In an embodiment, the PII promoter component is an RCVRN promoter (e.g., a human RCVRN promoter) component, and comprises, or consists of, a nucleotide sequence that is the same as, differs by no more than 1, 2, 3, 4, 5, 6, 7, 8, 9, or 10 nucleotides from, or has at least has at least 90%, 92%, 94%, 96%, 98%, or 99% homology with, the nucleotide sequence of SEQ ID NO: 406. In an embodiment, the PII promoter comprises, or consists of, a nucleotide sequence that is the same as the nucleotide sequence of SEQ ID NO: 406.

[0211] In an embodiment, the N-ter NLS component comprises, or consists of, a nucleotide sequence that is the same as the nucleotide sequence of SEQ ID NO: 420 or a nucleotide sequence encoding the amino acid sequence of SEQ ID NO: 434.

[0212] In an embodiment, the Cas9 component comprises, or consists of, a nucleotide sequence that is the same as the nucleotide sequence of SEQ ID NO: 421 or a nucleotide sequence encoding the amino acid sequence of SEQ ID NO: 26.

[0213] In an embodiment, the C-ter NLS component comprises, or consists of, a nucleotide sequence that is the same as the nucleotide sequence of SEQ ID NO: 422 or a nucleotide sequence encoding the amino acid sequence of SEQ ID NO: 434.

[0214] In an embodiment, the poly(A) signal component comprises, or consists of, a nucleotide sequence that is the same as any of the nucleotide sequences disclosed in Table 27, or any of the nucleotide sequences of SEQ ID NOs: 424, 455 or 456. In an embodiment, the poly(A) signal component comprises, or consists of, a nucleotide sequence that is the same as the nucleotide sequence of SEQ ID NO: 424.

[0215] In an embodiment, the spacer 3 component comprises, or consists of, a nucleotide sequence that is the same as the nucleotide sequence of SEQ ID NO: 425.

[0216] In an embodiment, the right ITR component comprises, or consists of, a nucleotide sequence that is the same as any of the nucleotide sequences of SEQ ID NOs: 436-444.

[0217] In an embodiment, the recombinant AAV genome further comprises a second gRNA component comprising a targeting domain and a scaffold domain,
[0218] wherein the targeting domain consists of a targeting domain sequence disclosed herein, in any of Tables 2A-2D, Tables 3A-3C, Tables 4A-4D, Tables 5A-5D, Tables 6A-6B, Tables 7A-7D, Tables 8A-8D, Tables 9A-9E, Tables 10A-10B, or Table 11; and
[0219] wherein the scaffold domain (also referred to as a tracr domain in FIGS. 20A-25F) comprises, or consists of, a nucleotide sequence that is the same as, or differs by no more than 1, 2, 3, 4, or 5 nucleotides from, or has at least has at least 90%, 92%, 94%, 96%, 98%, or 99% homology with, the nucleotide sequence of SEQ ID NO: 418.

[0220] In an embodiment, the targeting domain of the second gRNA component comprises, or consists of, a nucleotide sequence that is the same as a nucleotide sequence selected from Table 11. In an embodiment, the second gRNA component is between the first gRNA component and the spacer 2 component.

[0221] In an embodiment, the second gRNA component has the same nucleotide sequence as the first gRNA component. In another embodiment, the second gRNA component has a nucleotide sequence that is different from the second gRNA component.

[0222] In an embodiment, the recombinant AAV genome further comprises a second PIII promoter component that comprises, or consists of, an RNA polymerase III promoter sequence;

[0223] In an embodiment, the recombinant AAV genome further comprises a second PIII promoter component (e.g., a second U6 promoter component) between the first gRNA component and the second gRNA component.

[0224] In an embodiment, the second PIII promoter component (e.g., the second U6 promoter component) has the same nucleotide sequence as the first PIII promoter component (e.g., the first U6 promoter component). In another embodiment, the second PIII promoter component (e.g., the second U6 promoter component) has a nucleotide sequence that is different from the first PIII promoter component (e.g. the first U6 promoter component).

[0225] In an embodiment, the PIII promoter component is an H1 promoter component that comprises an H1 promoter sequence.

[0226] In an embodiment, the PIII promoter component is a tRNA promoter component that comprises a tRNA promoter sequence.

[0227] In an embodiment, the recombinant AAV genome further comprises a spacer 4 component between the first gRNA component and the second PIII promoter component (e.g., the second U6 promoter component). In an embodiment, the spacer 4 component comprises, or consists of, a nucleotide sequence having 0 to 150 nucleotides in length, e.g., SEQ ID NO: 427. In an embodiment, the spacer 4 component comprises, or consists of, a nucleotide sequence that is the same as the nucleotide sequence of SEQ ID NO: 427.

[0228] In an embodiment, the recombinant AAV genome comprises the following components:

[chemical structure]

[0229] In an embodiment, the recombinant AAV genome further comprises an affinity tag component (e.g., 3xFLAG component), wherein the affinity tag component (e.g., 3xFLAG component) comprises, or consists of, a nucleotide sequence that is the same as, differs by no more than 1, 2, 3, 4, or 5 nucleotides from, or has at least has at least 90%, 92%, 94%, 96%, 98%, or 99% homology with, the nucleotides sequence of SEQ ID NO: 423, or a nucleotide sequence encoding any of the amino acid sequences disclosed in Table 26 or any of the amino acid sequences of SEQ ID NOs: 426 or 451-454.

[0230] In an embodiment, the affinity tag component (e.g., 3xFLAG component) is between the C-ter NLS component and the poly(A) signal component. In an embodiment, the an affinity tag component (e.g., 3xFLAG component) comprises, or consists of, a nucleotide sequence that is the same as, the nucleotides sequence of SEQ ID NO: 423, or a nucleotide sequence encoding any of the amino acid sequences of SEQ ID NOs: 426 or 451-454.

[0231] In an embodiment, the recombinant AAV genome comprises the nucleotide sequences of SEQ ID NOs: 408, 417, 418, 401, 420, 421, 422, 424, and 437.

[0232] In an embodiment, the recombinant AAV genome comprises the nucleotide sequences of SEQ ID NOs: 408, 417, 418, 402, 420, 421, 422, 424, and 437.

[0233] In an embodiment, the recombinant AAV genome comprises the nucleotide sequences of SEQ ID NOs: 408, 417, 418, 403, 420, 421, 422, 424, and 437.

[0234] In an embodiment, the recombinant AAV genome comprises the nucleotide sequences of SEQ ID NOs: 408, 417, 418, 404, 420, 421, 422, 424, and 437.

[0235] In an embodiment, the recombinant AAV genome comprises the nucleotide sequences of SEQ ID NOs: 408, 417, 418, 405, 420, 421, 422, 424, and 437.

[0236] In an embodiment, the recombinant AAV genome comprises the nucleotide sequences of SEQ ID NOs: 408, 417, 418, 406, 420, 421, 422, 424, and 437.

[0237] In an embodiment, the recombinant AAV genome further comprises SEQ ID NOs: 416, 419, and 425, and, optionally, SEQ ID NO 427.

[0238] In an embodiment, the recombinant AAV genome further comprises the nucleotide sequence of SEQ ID NO: 423.

[0239] In an embodiment, the recombinant AAV genome comprises or consists of one or more (e.g., 2, 3, 4, 5, 6, 7, 8, 9, 10, 11, 12 or all) of the component sequences shown in FIG. 19A-19G, 20A-20F, 21A-21F, 22A-22F, 23A-23F, or 24A-24F, Tables 20 or 25-27, or any of the nucleotide sequences of SEQ ID NOs: 428-433 or 436-444.

[0240] In another aspect, disclosed herein is a recombinant adenovirus-associated virus (AAV) genome comprising the following components:

[chemical structure]

[0241] wherein the left ITR component comprises, or consists of, a nucleotide sequence that is the same as, or differs by no more than 1, 2, 3, 4, 5, 6, 7, 8, 9, or 10 nucleotides from, or has at least 90%, 92%, 94%, 96%, 98%, or 99% homology with, any of the left ITR nucleotide sequences disclosed in Table 25, or any of the nucleotide sequences of SEQ ID NOs: 407-415;
[0242] wherein the spacer 1 component comprises, or consists of, a nucleotide sequence having 0 to 150 nucleotides in length, e.g., SEQ ID NO: 416;
[0243] wherein the first PIII promoter component (e.g., a first U6 promoter component) comprises, or consists of, a nucleotide sequence that is the same as, differs by no more than 1, 2, 3, 4, 5, 6, 7, 8, 9, or 10 nucleotides from, or has at least has at least 90%, 92%, 94%, 96%, 98%, or 99% homology with, the nucleotide sequence of SEQ ID NO: 417;
[0244] wherein the first gRNA component comprises a targeting domain and a scaffold domain,
   [0245] wherein the targeting domain is 16-26 nucleotides in length, and comprises, or consists of, a targeting domain sequence disclosed herein, e.g., in any of Tables 2A-2D, Tables 3A-3C, Tables 4A-4D, Tables 5A-5D, Tables 6A-6B, Tables 7A-7D, Tables 8A-8D, Tables 9A-9E, Tables 10A-10B, or Table 11; and
   [0246] wherein the scaffold domain (also referred to herein as a tracr domain in FIGS. 19A-24F) comprises, or consists of, a nucleotide sequence that is the same as, or differs by no more than 1, 2, 3, 4, or 5 nucleotides from, or has at least has at least 90%, 92%, 94%, 96%, 98%, or 99% homology with, the nucleotide sequence of SEQ ID NO: 418;
[0247] wherein the spacer 4 component comprises, or consists of, a nucleotide sequence having 0 to 150 nucleotides in length, e.g., SEQ ID NO: 427.
[0248] wherein the second gRNA component comprises a targeting domain and a scaffold domain,
   [0249] wherein the targeting domain of the second gRNA component is 16-26 nucleotides in length and comprises, or consists of, a targeting domain sequence disclosed herein, e.g., in any of Tables 2A-2D, Tables 3A-3C, Tables 4A-4D, Tables 5A-5D, Tables 6A-6B, Tables 7A-7D, Tables 8A-8D, Tables 9A-9E, Tables 10A-10B, or Table 11; and
   [0250] wherein the scaffold domain (also referred to as a tracr domain in FIGS. 19A-24F) of the second gRNA component comprises, or consists of, a nucleotide sequence that is the same as, or differs by no more than 1, 2, 3, 4, or 5 nucleotides from, or has at least has at least 90%, 92%, 94%, 96%, 98%, or 99% homology with, the nucleotide sequence of SEQ ID NO: 418.
[0251] wherein the spacer 2 component comprises, or consists of, a nucleotide sequence having 0 to 150 nucleotides in length e.g., SEQ ID NO: 419;
[0252] wherein the PII promoter component comprises, or consists of, a polymerase II promoter sequence, e.g., a constitutive or tissue specific promoter, e.g., a promoter disclosed in Table 20;
[0253] wherein the N-ter NLS component comprises, or consists of, a nucleotide sequence that is the same as, differs by no more than 1, 2, 3, 4, or 5 nucleotides from, or has at least has at least 90%, 92%, 94%, 96%, 98%, or 99% homology with, the nucleotide sequence of SEQ ID NO: 420 or a nucleotide sequence that encodes the amino acid sequence of SEQ ID NO: 434;
[0254] wherein the Cas9 component comprises, or consists of, a nucleotide sequence that is the same as, differs by no more than 1, 2, 3, 4, 5, 6, 7, 8, 9, or 10 nucleotides from, or has at least 90%, 92%, 94%, 96%, 98%, or 99% homology with, the nucleotide sequence of SEQ ID NO: 421 or a nucleotide sequence that encodes the amino acid sequence of SEQ ID NO: 26;
[0255] wherein the C-ter NLS component comprises, or consists of, a nucleotide sequence that is the same as, differs by no more than 1, 2, 3, 4, or 5 nucleotides from, or has at least has at least 90%, 92%, 94%, 96%, 98%, or 99% homology with, the nucleotide sequence of SEQ ID NO: 422 or a nucleotide sequence that encodes the amino acid sequence of SEQ ID NO: 434;
[0256] wherein the poly(A) signal component comprises, or consists of, a nucleotide sequence that is the same as, differs by no more than 1, 2, 3, 4, 5, 6, 7, 8, 9, or 10 nucleotides from, or has at least has at least 90%, 92%, 94%, 96%, 98%, or 99% homology with, any of the nucleotide sequences disclosed in Table 27, or any of the nucleotide sequence of SEQ ID NO: 424, 455 or 456;
[0257] wherein the spacer 3 component comprises, or consists of, a nucleotide sequence having 0 to 150 nucleotides in length, e.g., SEQ ID NO: 425; and
[0258] wherein the right ITR component comprises, or consists of, a nucleotide sequence that is the same as, or differs by no more than 1, 2, 3, 4, 5, 6, 7, 8, 9, or 10 nucleotides from, or has at least has at least 90%, 92%, 94%, 96%, 98%, or 99% homology with, any of the right ITR nucleotide sequences disclosed in Table 25, or SEQ ID NOs: 436-444.

[0259] In an embodiment, the left ITR component comprises, or consists of, a nucleotide sequence that is the same as any of the nucleotide sequences of SEQ ID NOs: 407-415.

[0260] In an embodiment, the spacer 1 component comprises, or consists of, a nucleotide sequence that is the same as the nucleotide sequence of SEQ ID NO: 416.

[0261] In an embodiment, the first PIII promoter component (e.g., the first U6 promoter component) comprises, or consists of, a nucleotide sequence that is the same as the nucleotide sequence of SEQ ID NO: 417.

[0262] In an embodiment, the first PIII promoter is an H1 promoter component that comprises an H1 promoter sequence. In another embodiment, the first PIII promoter is a tRNA promoter component that comprises a tRNA promoter sequence.

[0263] In an embodiment, the targeting domain of the first gRNA component comprises, or consists of, a nucleotide sequence that is the same as a nucleotide sequence selected from Table 11.

[0264] In an embodiment, the gRNA scaffold domain of the first gRNA component comprises, or consists of, a nucleotide sequence that is the same as the nucleotide sequence of SEQ ID NO: 418.

[0265] In an embodiment, the spacer 4 component comprises, or consists of, a nucleotide sequence that is the same as the nucleotide sequence of SEQ ID NO: 427.

[0266] In an embodiment, the second PIII promoter component (e.g., the first U6 promoter component) has the same nucleotide sequence as the first PIII promoter component (e.g., the first U6 promoter component). In another embodiment, the second PIII promoter component (e.g., the second U6 promoter component) has a nucleotide sequence that is different from the first PIII promoter component (e.g., the first U6 promoter component).

[0267] In an embodiment, the second PIII promoter is an H1 promoter component that comprises an H1 promoter sequence. In another embodiment, the second PIII promoter is a tRNA promoter component that comprises a tRNA promoter sequence.

[0268] In an embodiment, the targeting domain of the second gRNA component comprises, or consists of, a nucleotide sequence that is the same as a nucleotide sequence selected from Table 11.

[0269] In an embodiment, the second gRNA component has the same nucleotide sequence as the first gRNA component. In another embodiment, the second gRNA component has a nucleotide sequence that is different from the second gRNA component.

[0270] In an embodiment, the spacer 2 component comprises, or consists of, a nucleotide sequence having 0 to 150 nucleotides in length e.g., SEQ ID NO: 419;

[0271] In an embodiment, the PII promoter component is a CMV promoter component, and comprises, or consists of, a nucleotide sequence that is the same as, differs by no more than 1, 2, 3, 4, 5, 6, 7, 8, 9, or 10 nucleotides from, or has at least has at least 90%, 92%, 94%, 96%, 98%, or 99% homology with, the nucleotide sequence of SEQ ID NO: 401. In an embodiment, the PII promoter comprises, or consists of, a nucleotide sequence that is the same as the nucleotide sequence of SEQ ID NO: 401.

[0272] In an embodiment, the PII promoter component is an EFS promoter component, and comprises, or consists of, a nucleotide sequence that is the same as, differs by no more than 1, 2, 3, 4, 5, 6, 7, 8, 9, or 10 nucleotides from, or has at least has at least 90%, 92%, 94%, 96%, 98%, or 99% homology with, the nucleotide sequence of SEQ ID NO: 402. In an embodiment, the PII promoter comprises, or consists of, a nucleotide sequence that is the same as the nucleotide sequence of SEQ ID NO: 402.

[0273] In an embodiment, the PII promoter component is a GRK1 promoter (e.g., a human GRK1 promoter) component, and comprises, or consists of, a nucleotide sequence that is the same as, differs by no more than 1, 2, 3, 4, 5, 6, 7, 8, 9, or 10 nucleotides from, or has at least has at least 90%, 92%, 94%, 96%, 98%, or 99% homology with, the nucleotide sequence of SEQ ID NO: 403. In an embodiment, the PII promoter comprises, or consists of, a nucleotide sequence that is the same as the nucleotide sequence of SEQ ID NO: 403.

[0274] In an embodiment, the PII promoter component is a CRX promoter (e.g., a human CRX promoter) component, and comprises, or consists of, a nucleotide sequence that is the same as, differs by no more than 1, 2, 3, 4, 5, 6, 7, 8, 9, or 10 nucleotides from, or has at least has at least 90%, 92%, 94%, 96%, 98%, or 99% homology with, the nucleotide sequence of SEQ ID NO: 404. In an embodiment, the PII promoter comprises, or consists of, a nucleotide sequence that is the same as the nucleotide sequence of SEQ ID NO: 404.

[0275] In an embodiment, the PII promoter component is an NRL promoter (e.g., a human NRL promoter) component, and comprises, or consists of, a nucleotide sequence that is the same as, differs by no more than 1, 2, 3, 4, 5, 6, 7, 8, 9, or 10 nucleotides from, or has at least has at least 90%, 92%, 94%, 96%, 98%, or 99% homology with, the nucleotide sequence of SEQ ID NO: 405. In an embodiment, the PII promoter comprises, or consists of, a nucleotide sequence that is the same as the nucleotide sequence of SEQ ID NO: 405.

[0276] In an embodiment, the PII promoter component is an RCVRN promoter (e.g., a human RCVRN promoter) component, and comprises, or consists of, a nucleotide sequence that is the same as, differs by no more than 1, 2, 3, 4, 5, 6, 7, 8, 9, or 10 nucleotides from, or has at least has at least 90%, 92%, 94%, 96%, 98%, or 99% homology with, the nucleotide sequence of SEQ ID NO: 406. In an embodiment, the PII promoter comprises, or consists of, a nucleotide sequence that is the same as the nucleotide sequence of SEQ ID NO: 406.

[0277] In an embodiment, the N-ter NLS component comprises, or consists of, a nucleotide sequence that is the same as the nucleotide sequence of SEQ ID NO: 420 or a nucleotide sequence encoding the amino acid sequence of SEQ ID NO: 434.

[0278] In an embodiment, the Cas9 component comprises, or consists of, a nucleotide sequence that is the same as the nucleotide sequence of SEQ ID NO: 421 or a nucleotide sequence encoding the amino acid sequence of SEQ ID NO: 26.

[0279] In an embodiment, the C-ter NLS component comprises, or consists of, a nucleotide sequence that is the same as the nucleotide sequence of SEQ ID NO: 422 or a nucleotide sequence encoding the amino acid sequence of SEQ ID NO: 434.

[0280] In an embodiment, the poly(A) signal component comprises, or consists of, a nucleotide sequence that is the same as any of the nucleotide sequences disclosed in Table 27, or any of the nucleotide sequences of SEQ ID NOs: 424, 455 or 456. In an embodiment, the poly(A) signal component comprises, or consists of, a nucleotide sequence that is the same as the nucleotide sequence of SEQ ID NO: 424.

[0281] In an embodiment, the spacer 3 component comprises, or consists of, a nucleotide sequence that is the same as the nucleotide sequence of SEQ ID NO: 425.

[0282] In an embodiment, the right ITR component comprises, or consists of, a nucleotide sequence that is the same as any of the nucleotide sequences disclosed in Table 25, or any of the nucleotide sequences of SEQ ID NOs: 436-444.

[0283] In an embodiment, the recombinant AAV genome further comprises an affinity tag component (e.g., a 3xFLAG component). In an embodiment, the affinity tag component (e.g., the 3xFLAG component) comprises, or consists of, a nucleotide sequence that is the same as, differs by no more than 1, 2, 3, 4, or 5 nucleotides from, or has at least has at least 90%, 92%, 94%, 96%, 98%, or 99% homology with, the nucleotide sequence of SEQ ID NO: 423, or a nucleotide sequence encoding any of the amino acid sequences disclosed in Table 26 or any of the amino acid sequences of SEQ ID NO: 426 or 451-454.

[0284] In an embodiment, the affinity tag component (e.g., the 3xFLAG component) is between the C-ter NLS component and the poly(A) signal component. In an embodiment, the affinity tag component (e.g., the 3xFLAG component) comprises, or consists of, a nucleotide sequence that is the same as, the nucleotide sequence of SEQ ID NO: 423 or a nucleotide sequence encoding the amino acid sequence of SEQ ID NO: 426.

[0285] In an embodiment, the recombinant AAV genome comprises the nucleotide sequences of SEQ ID NOs: 408, 417, 418, 401, 420, 421, 422, 424, and 437.

[0286] In an embodiment, the recombinant AAV genome comprises the nucleotide sequences of SEQ ID NOs: 408, 417, 418, 402, 420, 421, 422, 424, and 437.

[0287] In an embodiment, the recombinant AAV genome comprises the nucleotide sequences of SEQ ID NOs: 408, 417, 418, 403, 420, 421, 422, 424, and 437.

[0288] In an embodiment, the recombinant AAV genome comprises the nucleotide sequences of SEQ ID NOs: 408, 417, 418, 404, 420, 421, 422, 424, and 437.

[0289] In an embodiment, the recombinant AAV genome comprises the nucleotide sequences of SEQ ID NOs: 408, 417, 418, 405, 420, 421, 422, 424, and 437.

[0290] In an embodiment, the recombinant AAV genome comprises the nucleotide sequences of SEQ ID NOs: 408, 417, 418, 406, 420, 421, 422, 424, and 437.

[0291] In an embodiment, the recombinant AAV genome further comprises the nucleotide sequences of SEQ ID NO: 416, 419, 425, and 427.

[0292] In an embodiment, the recombinant AAV genome further comprises the nucleotide sequence of SEQ ID NO: 423.

[0293] In an embodiment, the recombinant AAV genome comprises any of the nucleotide sequences of SEQ ID NOs: 428-433.

[0294] In an embodiment, the recombinant AAV genome comprises, or consists of, a nucleotide sequence that is the same as, differs by no more than 100, 200, 300, 400, or 500 nucleotides from, or has at least has at least 90%, 92%, 94%, 96%, 98%, or 99% homology with any of the nucleotide sequences shown in FIG. 19A-19G, 20A-20F, 21A-21F, 22A-22F, 23A-23F, or 24A-24F, or any of the nucleotide sequences of SEQ ID NOs: 428-433 or 436-444.

[0295] In an embodiment, the recombinant AAV genome comprises, or consists of, a nucleotide sequence that is the same as any of the nucleotide sequences shown in FIGS. 19A-19G, 20A-20F, 21A-21F, 22A-22F, 23A-23F, or 24A-24F, or any of the nucleotide sequences of SEQ ID NOs: 428-433 or 436-444.

[0296] In an embodiment, the recombinant AAV genome comprises or consists of one or more (e.g., 2, 3, 4, 5, 6, 7, 8, 9, 10, 11, 12 or all) of the component sequences shown in FIG. 19A-19G, 20A-20F, 21A-21F, 22A-22F, 23A-23F, or 24A-24F, or Tables 20 or 25-27, or any of the nucleotide sequences of SEQ ID NOs: 428-433 or 436-444.

[0297] Unless otherwise indicated, when components of a recombinant AAV genome are described herein, the order can be as provided, but other orders are included as well. In other words, in an embodiment, the order is as set out in the text, but in other embodiments, the order can be different.

[0298] It is understood that the recombinant AAV genomes disclosed herein can be single stranded or double stranded. Disclosed herein are also the reverse, complementary form of any of the recombinant AAV genomes disclosed herein, and the double stranded form thereof.

[0299] In another aspect, disclosed herein is a nucleic acid molecule (e.g., an expression vector) that comprises a recombinant AAV genome disclosed herein. In an embodiment, the nucleic acid molecule further comprises a nucleotide sequence that encodes an antibiotic resistant gene (e.g., an Amp resistant gene). In an embodiment, the nucleic acid molecule further comprises replication origin sequence (e.g., a ColE1 origin, an M13 origin, or both).

[0300] In another aspect, disclosed herein is a recombinant AAV viral particle comprising a recombinant AAV genome disclosed herein.

[0301] In an embodiment, the recombinant AAV viral particle has any of the serotype disclosed herein, e.g., in Table 25, or a combination thereof. In another embodiment, the recombinant AAV viral particle has a tissue specificity of retinal pigment epithelium cells, photoreceptors, horizontal cells, bipolar cells, amacrine cells, ganglion cells, or a combination thereof.

[0302] In another aspect, disclosed herein is a method of producing a recombinant AAV viral particle disclosed herein comprising providing a recombinant AAV genome disclosed herein and one or more capsid proteins under conditions that allow for assembly of an AAV viral particle.

[0303] In another aspect, disclosed herein is a method of altering a cell comprising contacting the cell with a recombinant AAV viral particle disclosed herein.

[0304] In another aspect, disclosed herein is a method of treating a subject having or likely to develop LCA10 comprising contacting the subject (or a cell from the subject) with a recombinant viral particle disclosed herein.

[0305] In another aspect, disclosed herein is a recombinant AAV viral particle comprising a recombinant AAV genome disclosed herein for use in treating LCA10 in a subject.

[0306] In another aspect, disclosed herein is use of a recombinant AAV viral particle comprising a recombinant AAV genome disclosed herein in the manufacture of a medicament for treating LCA10 in a subject.

[0307] The gRNA molecules and methods, as disclosed herein, can be used in combination with a governing gRNA molecule, comprising a targeting domain which is complementary to a target domain on a nucleic acid that encodes a component of the CRISPR/Cas system introduced into a cell or subject. In an embodiment, the governing gRNA molecule targets a nucleic acid that encodes a Cas9 molecule or a nucleic acid that encodes a target gene gRNA molecule. In an embodiment, the governing gRNA comprises a targeting domain that is complementary to a target domain in a sequence that encodes a Cas9 component, e.g., a Cas9 molecule or target gene gRNA molecule. In an embodiment, the target domain is designed with, or has, minimal homology to other nucleic acid sequences in the cell, e.g., to minimize off-target cleavage. For example, the targeting domain on the governing gRNA can be selected to reduce or minimize off-target effects. In an embodiment, a target domain for a governing gRNA can be disposed in the control or coding region of a Cas9 molecule or disposed between a control region and a transcribed region. In an embodiment, a target domain for a governing gRNA can be disposed in the control or coding region of a target gene gRNA molecule or disposed between a control region and a transcribed region for a target gene gRNA. While not wishing to be bound by theory, in an embodiment, it is believed that altering, e.g., inactivating, a nucleic acid that encodes a Cas9 molecule or a nucleic acid that encodes a target gene gRNA molecule can be effected by cleavage of the targeted nucleic acid sequence or by binding of a Cas9 molecule/governing gRNA molecule complex to the targeted nucleic acid sequence.

[0308] The compositions, reaction mixtures and kits, as disclosed herein, can also include a governing gRNA molecule, e.g., a governing gRNA molecule disclosed herein.

[0309] Unless otherwise defined, all technical and scientific terms used herein have the same meaning as commonly understood by one of ordinary skill in the art to which this invention belongs. Although methods and materials similar or equivalent to those described herein can be used in the practice or testing of the present invention, suitable methods and materials are described below. All publications, patent applications, patents, and other references mentioned herein are incorporated by reference in their entirety. In addition, the materials, methods, and examples are illustrative only and not intended to be limiting.

[0310] Headings, including numeric and alphabetical headings and subheadings, are for organization and presentation and are not intended to be limiting.

[0311] Other features and advantages of the invention will be apparent from the detailed description, drawings, and from the claims.

### BRIEF DESCRIPTION OF THE DRAWINGS

[0312] FIGS. 1A-1G are representations of several exemplary gRNAs.

[0313] FIG. 1A depicts a modular gRNA molecule derived in part (or modeled on a sequence in part) from Streptococcus pyogenes (S. pyogenes) as a duplexed structure (SEQ ID NOs: 42 and 43, respectively, in order of appearance);

[0314] FIG. 1B depicts a unimolecular (or chimeric) gRNA molecule derived in part from S. pyogenes as a duplexed structure (SEQ ID NO: 44);

[0315] FIG. 1C depicts a unimolecular gRNA molecule derived in part from S. pyogenes as a duplexed structure (SEQ ID NO: 45);

[0316] FIG. 1D depicts a unimolecular gRNA molecule derived in part from S. pyogenes as a duplexed structure (SEQ ID NO: 46);

[0317] FIG. 1E depicts a unimolecular gRNA molecule derived in part from S. pyogenes as a duplexed structure (SEQ ID NO: 47);

[0318] FIG. 1F depicts a modular gRNA molecule derived in part from Streptococcus thermophilus (S. thermophilus) as a duplexed structure (SEQ ID NOs: 48 and 49, respectively, in order of appearance);

[0319] FIG. 1G depicts an alignment of modular gRNA molecules of S. pyogenes (SEQ ID NOs: 42 and 52) and S. thermophilus (SEQ ID NOs: 48 and 49).

[0320] FIGS. 2A-2G depict an alignment of Cas9 sequences from Chylinski 2013. The N-terminal RuvC-like domain is boxed and indicated with a “Y”. The other two RuvC-like domains are boxed and indicated with a “B”. The HNH-like domain is boxed and indicated by a “G”. Sm: S. mutans (SEQ ID NO: 1); Sp: S. pyogenes (SEQ ID NO: 2); St: S. thermophilus (SEQ ID NO: 3); Li: L. innocua (SEQ ID NO: 4). Motif: this is a motif based on the four sequences: residues conserved in all four sequences are indicated by single letter amino acid abbreviation; “*” indicates any amino acid found in the corresponding position of any of the four sequences; and “-” indicates any amino acid, e.g., any of the 20 naturally occurring amino acids (SEQ ID NO: 2804).

[0321] FIGS. 3A-3B show an alignment of the N-terminal RuvC-like domain from the Cas9 molecules disclosed in Chylinski 2013 (SEQ ID NOs: 54, 56, and 58-103, respectively, in order of appearance). The last line of FIG. 3B identifies 4 highly conserved residues.

[0322] FIGS. 4A-4B show an alignment of the N-terminal RuvC-like domain from the Cas9 molecules disclosed in Chylinski 2013 with sequence outliers removed. The last line of FIG. 4B identifies 3 highly conserved residues.

[0323] FIGS. 5A-5C show an alignment of the HNH-like domain from the Cas9 molecules disclosed in Chylinski 2013 (SEQ ID NOs: 178-252, respectively, in order of appearance). The last line of FIG. 5C identifies conserved residues.

[0324] FIGS. 6A-6B show an alignment of the HNH-like domain from the Cas9 molecules disclosed in Chylinski 2013 with sequence outliers removed. The last line of FIG. 6B identifies 3 highly conserved residues.

[0325] FIGS. 7A-7B depict an alignment of Cas9 sequences from S. pyogenes and Neisseria meningitidis (N. meningitidis). The N-terminal RuvC-like domain is boxed and indicated with a “Y”. The other two RuvC-like domains are boxed and indicated with a “B”. The HNH-like domain is boxed and indicated with a “G”. Sp: S. pyogenes; Nm: N. meningitidis. Motif: this is a motif based on the two sequences: residues conserved in both sequences are indicated by a single amino acid designation; “*” indicates any amino acid found in the corresponding position of any of the two sequences; “-” indicates any amino acid, e.g., any of the 20 naturally occurring amino acids, and “-” indicates any amino acid, e.g., any of the 20 naturally occurring amino acids, or absent.

[0326] FIG. 8 shows a nucleic acid sequence encoding Cas9 of N. meningitidis (SEQ ID NO: 303). Sequence indicated by an “R” is an SV40 NLS; sequence indicated as “G” is an HA tag; and sequence indicated by an “O” is a synthetic NLS sequence; the remaining (unmarked) sequence is the open reading frame (ORF).

[0327] FIGS. 9A-9B are schematic representations of the domain organization of S. pyogenes Cas 9. FIG. 9A shows the organization of the Cas9 domains, including amino acid positions, in reference to the two lobes of Cas9 (recognition (REC) and nuclease (NUC) lobes). FIG. 9B shows the percent homology of each domain across 83 Cas9 orthologs.)

[0328] FIG. 10 shows the nucleotide locations of the Alu repeats, cryptic exon and point mutation, c.2991+1655 A to G in the human CEP290 locus. “X” indicates the cryptic exon. The blue triangle indicates the LCA target position c.2991+1655A to G.

[0329] FIG. 11A-11B show the rates of indels induced by various gRNAs at the CEP290 locus. FIG. 11A shows gene editing (% indels) as assessed by sequencing for S. pyogenes and S. aureus gRNAs when co-expressed with Cas9 in patient-derived IVS26 primary fibroblasts. FIG. 11B shows gene editing (% indels) as assessed by sequencing for S. aureus gRNAs when co-expressed with Cas9 in HEK293 cells.

[0330] FIGS. 12A-12B show changes in expression of the wild-type and mutant (including cryptic exon) alleles of CEP290 in cells transfected with Cas9 and the indicated gRNA pairs. Total RNA was isolated from modified cells and qRT-PCR with Taqman primer-probe sets was used to quantify expression. Expression is normalized to the Beta-Actin housekeeping gene and each sample is normalized to the GFP control sample (cells transfected with only GFP). Error bars represent standard deviation of 4 technical replicates.

[0331] FIG. 13 shows changes in gene expression of the wild-type and mutant (including cryptic exon) alleles of CEP290 in cells transfected with Cas9 and pairs of gRNAs shown to have in initial qRT-PCR screening. Total RNA was isolated from modified cells and qRT-PCR with Taqman primer-probe sets was used to quantify expression. Expression is normalized to the Beta-Actin housekeeping gene and each sample is normalized to the GFP control sample (cells transfected with only GFP). Error bars represent standard error of the mean of two to six biological replicates.

[0332] FIG. 14 shows deletion rates in cells transfected with indicated gRNA pairs and Cas9 as measured by droplet digital PCR (ddPCR). % deletion was calculated by dividing the number of positive droplets in deletion assay by the number of positive droplets in a control assay. Three biological replicates are shown for two different gRNA pairs.

[0333] FIG. 15 shows deletion rates in 293T cells transfected with exemplary AAV expression plasmids. pSS10 encodes EFS-driven saCas9 without gRNA. pSS15 and pSS17 encode EFS-driven saCas9 and one U6-driven gRNA, CEP290-64 and CEP290-323 respectively. pSS11 encodes EFS-driven saCas9 and two U6-driven gRNAs, CEP290-64 and CEP290-323 in the same vector. Deletion PCR were performed with gDNA exacted from 293T cells post transfection. The size of the PCR amplicons indicates the presence or absence of deletion events, and the deletion ratio was calculated.

[0334] FIG. 16 shows the composition of structural proteins in AAV2 viral preps expressing Cas9. Reference AAV2 vectors (lanes 1 & 2) were obtained from Vector Core at University of North Carolina, Chapel Hill. AAV2-CMV-GFP (lane 3) and AAV2-CMV-saCas9-minpA (lane4) were packaged and purified with “Triple Transfection Protocol” followed by CsCl ultracentrifugation. Titers were obtained by quantitative PCR with primers annealing to the ITR structures on these vectors. Viral preps were denatured and probed with B1 antibody on Western Blots to demonstrate three structural proteins composing AAV2, VP1, VP2, and VP3 respectively.

[0335] FIG. 17 depicts the deletion rates in 293T cells transduced with AAV viral vectors at MOI of 1000 viral genome (vg) per cell and 10,000 vg per cell. AAV2 viral vectors were produced with “Triple Transfection Protocol” using pHelper, pRep2Cap2, pSS8 encoding gRNAs CEP290-64 and CEP290-323, and CMV-driven saCas9. Viral preps were titered with primers annealing to ITRs on pSS8. 6 days post transduction, gDNA were extracted from 293T cells. Deletion PCR was carried out on the CEP290 locus, and deletion rates were calculated based on the predicted amplicons. Western blotting was carried out to show the AAV-mediated saCas9 expression in 293T cells (primary antibody: anti-Flag, M2; loading control: anti-alphaTubulin).

[0336] FIG. 18A-18B depicts additional exemplary structures of unimolecular gRNA molecules. FIG. 18A (SEQ ID NO: 45) shows an exemplary structure of a unimolecular gRNA molecule derived in part from S. pyogenes as a duplexed structure. FIG. 18B (SEQ ID NO: 2779) shows an exemplary structure of a unimolecular gRNA molecule derived in part from S. aureus as a duplexed structure.

[0337] FIGS. 19A-19G depicts the nucleotide sequence of an exemplary recombinant AAV genome containing a CMV promoter. Various components of the recombinant AAV genome are also indicated. N=A, T, G or C. The number of N residues can vary, e.g., from 16 to 26 nucleotides. Upper stand: 5′→3′ (SEQ ID NO: 428); lower stand: 3′→5′ SEQ ID NO: 445).

[0338] FIGS. 20A-20F depicts the nucleotide sequence of an exemplary recombinant AAV genome containing an EFS promoter. Various components of the recombinant AAV genome are also indicated. N=A, T, G or C. The number of N residues can vary, e.g., from 16 to 26 nucleotides. Upper stand: 5′→3′ (SEQ ID NO: 429); lower stand: 3′→5′ (SEQ ID NO: 446).

[0339] FIGS. 21A-21F depicts the nucleotide sequence of an exemplary recombinant AAV genome containing a CRK1 promoter. Various components of the recombinant AAV genome are also indicated. N=A, T, G or C. The number of N residues can vary, e.g., from 16 to 26 nucleotides. Upper stand: 5′→3′ (SEQ ID NO: 430); lower stand: 3′→5′ (SEQ ID NO: 447).

[0340] FIGS. 22A-22F depicts the nucleotide sequence of an exemplary recombinant AAV genome containing a CRX promoter. Various components of the recombinant AAV genome are also indicated. N=A, T, G or C. The number of N residues can vary, e.g., from 16 to 26 nucleotides. Upper stand: 5′→3′ (SEQ ID NO: 431); lower stand: 3′→5′ (SEQ ID NO: 448).

[0341] FIGS. 23A-23F depicts the nucleotide sequence of an exemplary recombinant AAV genome containing a NRL promoter. Various components of the recombinant AAV genome are also indicated. N=A, T, G or C. The number of N residues can vary, e.g., from 16 to 26 nucleotides. Upper stand: 5′→3′ (SEQ ID NO: 432); lower stand: 3′→5′ (SEQ ID NO: 449).

[0342] FIGS. 24A-24F depicts the nucleotide sequence of an exemplary recombinant AAV genome containing a NRL promoter. Various components of the recombinant AAV genome are also indicated. N=A, T, G or C. The number of N residues can vary, e.g., from 16 to 26 nucleotides. Upper stand: 5′→3′ (SEQ ID NO: 433); lower stand: 3′→5′ (SEQ ID NO: 450).

[0343] FIGS. 25A-D include schematic depictions of exemplary AAV viral genome according to certain embodiments of the disclosure. FIG. 25A shows an AAV genome for use in altering a CEP290 target position which encodes, inter alia, two guide RNAs having specific targeting domains selected from SEQ ID NOs: 389-391, 388, 392, and 394 and an S. aureus Cas9. In certain embodiments, the AAV genome having the configuration illustrated in FIG. 25A may comprise the sequence set forth in SEQ ID NO: 2802. In certain of those embodiments, the genome having the configuration illustrated in FIG. 25A may comprise the sequence set forth in SEQ ID NO: 2803. FIG. 25B shows an AAV genome that may be used for a variety of applications, including without limitation the alteration of the CEP290 target position, encoding two guide RNAs comprising the sequences of SEQ ID NOs: 2785 and 2787 and an S. aureus Cas9. FIG. 25C shows an AAV genome encoding one or two guide RNAs, each driven by a U6 promoter, and an S. aureus Cas9. In the figure, N may be 1 or two. FIG. 25D shows a further annotated version of FIG. 25A, illustrating an AAV genome for use in altering a CEP290 target position which encodes the targeting domains from SEQ ID NOs: 389 and 388 and an S. aureus Cas9. In certain embodiments, the AAV genome having the configuration illustrated in FIG. 25D may comprise the sequence set forth in SEQ ID NO: 2802. In certain of those embodiments, the genome having the configuration illustrated in FIG. 25D may comprise the sequence set forth in SEQ ID NO: 2803.

[0344] FIG. 26 illustrates the genome editing strategy implemented in certain embodiments of this disclosure.

[0345] FIG. 27A shows a photomicrograph of a mouse retinal explant on a support matrix; retinal tissue is indicated by the arrow. FIG. 27B shows a fluorescence micrograph from a histological section of a mouse retinal explant illustrating AAV transduction of cells in multiple retinal layers with a GFP reporter. FIG. 27C shows a micrograph from a histological section of a primate retinal tissue treated with vehicle. FIG. 27D shows a micrograph from a histological section of a primate retinal tissue treated with AAV5 vector encoding S. aureus Cas9 operably linked to the photoreceptor-specific hGRK1 promoter. Dark staining in the outer nuclear layer (ONL) indicates that cells were successfully transduced with AAV and express Cas9.

[0346] FIG. 28A and FIG. 28B show expression of Cas9 mRNA and gRNA, respectively, normalized to GAPDH mRNA expression. UT denotes untreated; GRK1-Cas refers to a vector in which Cas9 expression is driven by the photoreceptor-specific hGRK1 promoter; dCMV-Cas and EFS-Cas similarly refer to vectors in which Cas9 expression is driven by the dCMV promoter or the EFS promoter. Conditions in which gRNAs are included in the vector are denoted by the bar captioned “with gRNA.” Light and dark bars depict separate experimental replicates.

[0347] FIG. 29 summarizes the edits observed in mouse retinal explants 7 days after transduction with AAV5-mCEPgRNAs-Cas9. Edits were binned into one of three categories: no edit, indel at one of two guide sites, and deletion of sequence between the guide sites. Each bar graph depicts the observed edits as a percentage of sequence reads from individual explants transduced with AAV vectors in which Cas9 was driven by the promoter listed (hGRK1, CMV or EFS).

[0348] FIG. 30 summarizes the edits observed in the CEP290 gene in retinal punch samples obtained from cynomolgus monkeys treated with AAV vectors encoding genome editing systems according to the present disclosure.

[0349] FIG. 31A depicts a reporter construct that was used to assess the effect of certain editing outcomes, including inversions and deletions, on the IVS26 splicing defect. FIG. 31B depicts the relative levels of GFP reporter expression in WT, IVS26, deletion and inversion conditions, normalized to mCherry expression.

[0350] FIG. 32 summarizes the productive CEP290 edits observed in human retinal explants 14 or 28 days after transduction with AAV vectors in which Cas9 was driven by the promoter listed (hGRK1 or CMV).

### DETAILED DESCRIPTION

### Definitions

[0351] Unless otherwise specified, each of the following terms has the meaning set forth in this section.

[0352] The indefinite articles “a” and “an” denote at least one of the associated noun, and are used interchangeably with the terms “at least one” and “one or more.” For example, the phrase “a module” means at least one module, or one or more modules.

[0353] The conjunctions “or” and “and/or” are used interchangeably.

[0354] “Domain” as used herein is used to describe segments of a protein or nucleic acid. Unless otherwise indicated, a domain is not required to have any specific functional property.

[0355] An “indel” is an insertion and/or deletion in a nucleic acid sequence. An indel may be the product of the repair of a DNA double strand break, such as a double strand break formed by a genome editing system of the present disclosure. An indel is most commonly formed when a break is repaired by an “error prone” repair pathway such as the NHEJ pathway described below. Indels are typically assessed by sequencing (most commonly by “next-gen” or “sequencing-by-synthesis” methods, though Sanger sequencing may still be used) and are quantified by the relative frequency of numerical changes (e.g., ±1, ±2 or more bases) at a site of interest among all sequencing reads. DNA samples for sequencing can be prepared by a variety of methods known in the art, and may involve the amplification of sites of interest by polymerase chain reaction (PCR) or the capture of DNA ends generated by double strand breaks, as in the GUIDEseq process described in Tsai 2016 (incorporated by reference herein). Other sample preparation methods are known in the art. Indels may also be assessed by other methods, including in situ hybridization methods such as the FiberComb™ system commercialized by Genomic Vision (Bagneux, France), and other methods known in the art.

[0356] “CEP290 target position” and “CEP290 target site” are used interchangeably herein to refer to a nucleotide or nucleotides in or near the CEP290 gene that are targeted for alteration using the methods described herein. In certain embodiments, a mutation at one or more of these nucleotides is associated with a CEP290 associated disease. The terms “CEP290 target position” and “CEP290 target site” are also used herein to refer to these mutations. For example, the IVS26 mutation is one non-limiting embodiment of a CEP290 target position/target site.

[0357] Calculations of homology or sequence identity between two sequences (the terms are used interchangeably herein) are performed as follows. The sequences are aligned for optimal comparison purposes (e.g., gaps can be introduced in one or both of a first and a second amino acid or nucleic acid sequence for optimal alignment and non-homologous sequences can be disregarded for comparison purposes). The optimal alignment is determined as the best score using the GAP program in the GCG software package with a Blossum 62 scoring matrix with a gap penalty of 12, a gap extend penalty of 4, and a frameshift gap penalty of 5. The amino acid residues or nucleotides at corresponding amino acid positions or nucleotide positions are then compared. When a position in the first sequence is occupied by the same amino acid residue or nucleotide as the corresponding position in the second sequence, then the molecules are identical at that position. The percent identity between the two sequences is a function of the number of identical positions shared by the sequences.

[0358] “Governing gRNA molecule” as used herein refers to a gRNA molecule that comprises a targeting domain that is complementary to a target domain on a nucleic acid that comprises a sequence that encodes a component of the CRISPR/Cas system that is introduced into a cell or subject. A governing gRNA does not target an endogenous cell or subject sequence. In an embodiment, a governing gRNA molecule comprises a targeting domain that is complementary with a target sequence on: (a) a nucleic acid that encodes a Cas9 molecule; (b) a nucleic acid that encodes a gRNA which comprises a targeting domain that targets the CEP290 gene (a target gene gRNA); or on more than one nucleic acid that encodes a CRISPR/Cas component, e.g., both (a) and (b). In an embodiment, a nucleic acid molecule that encodes a CRISPR/Cas component, e.g., that encodes a Cas9 molecule or a target gene gRNA, comprises more than one target domain that is complementary with a governing gRNA targeting domain. While not wishing to be bound by theory, it is believed that a governing gRNA molecule complexes with a Cas9 molecule and results in Cas9 mediated inactivation of the targeted nucleic acid, e.g., by cleavage or by binding to the nucleic acid, and results in cessation or reduction of the production of a CRISPR/Cas system component. In an embodiment, the Cas9 molecule forms two complexes: a complex comprising a Cas9 molecule with a target gene gRNA, which complex will alter the CEP290 gene; and a complex comprising a Cas9 molecule with a governing gRNA molecule, which complex will act to prevent further production of a CRISPR/Cas system component, e.g., a Cas9 molecule or a target gene gRNA molecule. In an embodiment, a governing gRNA molecule/Cas9 molecule complex binds to or promotes cleavage of a control region sequence, e.g., a promoter, operably linked to a sequence that encodes a Cas9 molecule, a sequence that encodes a transcribed region, an exon, or an intron, for the Cas9 molecule. In an embodiment, a governing gRNA molecule/Cas9 molecule complex binds to or promotes cleavage of a control region sequence, e.g., a promoter, operably linked to a gRNA molecule, or a sequence that encodes the gRNA molecule. In an embodiment, the governing gRNA, e.g., a Cas9-targeting governing gRNA molecule, or a target gene gRNA-targeting governing gRNA molecule, limits the effect of the Cas9 molecule/target gene gRNA molecule complex-mediated gene targeting. In an embodiment, a governing gRNA places temporal, level of expression, or other limits, on activity of the Cas9 molecule/target gene gRNA molecule complex. In an embodiment, a governing gRNA reduces off-target or other unwanted activity. In an embodiment, a governing gRNA molecule inhibits, e.g., entirely or substantially entirely inhibits, the production of a component of the Cas9 system and thereby limits, or governs, its activity.

[0359] “Modulator” as used herein refers to an entity, e.g., a drug that can alter the activity (e.g., enzymatic activity, transcriptional activity, or translational activity), amount, distribution, or structure of a subject molecule or genetic sequence. In an embodiment, modulation comprises cleavage, e.g., breaking of a covalent or non-covalent bond, or the forming of a covalent or non-covalent bond, e.g., the attachment of a moiety, to the subject molecule. In an embodiment, a modulator alters the, three dimensional, secondary, tertiary, or quaternary structure, of a subject molecule. A modulator can increase, decrease, initiate, or eliminate a subject activity.

[0360] “Large molecule” as used herein refers to a molecule having a molecular weight of at least 2, 3, 5, 10, 20, 30, 40, 50, 60, 70, 80, 90, or 100 kD. Large molecules include proteins, polypeptides, nucleic acids, biologics, and carbohydrates.

[0361] “Polypeptide” as used herein refers to a polymer of amino acids having less than 100 amino acid residues. In an embodiment, it has less than 50, 20, or 10 amino acid residues.

[0362] “Non-homologous end joining” or “NHEJ”, as used herein, refers to ligation mediated repair and/or non-template mediated repair including, e.g., canonical NHEJ (CNHEJ), alternative NHEJ (altNHEJ), microhomology-mediated end joining (MMEJ), single-strand annealing (SSA), and synthesis-dependent microhomology-mediated end joining (SD-MMEJ).

[0363] “Reference molecule”, e.g., a reference Cas9 molecule or reference gRNA, as used herein refers to a molecule to which a subject molecule, e.g., a subject Cas9 molecule of subject gRNA molecule, e.g., a modified or candidate Cas9 molecule is compared. For example, a Cas9 molecule can be characterized as having no more than 10% of the nuclease activity of a reference Cas9 molecule. Examples of reference Cas9 molecules include naturally occurring unmodified Cas9 molecules, e.g., a naturally occurring Cas9 molecule such as a Cas9 molecule of S. pyogenes, S. aureus, or S. thermophilus. In an embodiment, the reference Cas9 molecule is the naturally occurring Cas9 molecule having the closest sequence identity or homology with the Cas9 molecule to which it is being compared. In an embodiment, the reference Cas9 molecule is a sequence, e.g., a naturally occurring or known sequence, which is the parental form on which a change, e.g., a mutation has been made.

[0364] “Replacement”, or “replaced”, as used herein with reference to a modification of a molecule does not require a process limitation but merely indicates that the replacement entity is present.

[0365] “Small molecule” as used herein refers to a compound having a molecular weight less than about 2 kD, e.g., less than about 2 kD, less than about 1.5 kD, less than about 1 kD, or less than about 0.75 kD.

[0366] “Subject” as used herein means a human, mouse, or non-human primate. A human subject can be any age (e.g., an infant, child, young adult, or adult), and may suffer from a disease, or may be in need of alteration of a gene.

[0367] “Treat,” “treating,” and “treatment” as used herein mean the treatment of a disease in a subject (e.g., a human subject), including one or more of inhibiting the disease, i.e., arresting or preventing its development or progression; relieving the disease, i.e., causing regression of the disease state; relieving one or more symptoms of the disease; and curing the disease.

[0368] “Prevent,” “preventing,” and “prevention” as used herein means the prevention of a disease in a subject, e.g., in a human, including (a) avoiding or precluding the disease; (b) affecting the predisposition toward the disease; (c) preventing or delaying the onset of at least one symptom of the disease.

[0369] The terms “polynucleotide”, “nucleotide sequence”, “nucleic acid”, “nucleic acid molecule”, “nucleic acid sequence”, and “oligonucleotide” as used herein refer to a series of nucleotide bases (also called “nucleotides”) in DNA and RNA, and mean any chain of two or more nucleotides. The polynucleotides can be chimeric mixtures or derivatives or modified versions thereof, single-stranded or double-stranded. The oligonucleotide can be modified at the base moiety, sugar moiety, or phosphate backbone, for example, to improve stability of the molecule, its hybridization parameters, etc. A nucleotide sequence typically carries genetic information, including the information used by cellular machinery to make proteins and enzymes. These terms include double- or single-stranded genomic DNA, RNA, any synthetic and genetically manipulated polynucleotide, and both sense and antisense polynucleotides. This also includes nucleic acids containing modified bases.

[0370] “X” as used herein in the context of an amino acid sequence, refers to any amino acid (e.g., any of the twenty natural amino acids) unless otherwise specified.

[0371] Conventional IUPAC notation is used in nucleotide sequences presented herein, as shown in Table 1, below (see also Cornish-Bowden 1985, incorporated by reference herein). It should be noted, however, that “T” denotes “Thymine or Uracil” insofar as a given sequence (such as a qRNA sequence) may be encoded by either DNA or RNA.

TABLE 1
IUPAC nucleic acid notation

| Character | Base |
|---|---|
| A | Adenine |
| T | Thymine |
| G | Guanine |
| C | Cytosine |
| U | Uracil |
| K | G or T/U |
| M | A or C |
| R | A or G |
| Y | C or T/U |
| S | C or G |
| W | A or T/U |
| B | C, G, or T/U |
| V | A, C, or G |
| H | A, C, or T/U |
| D | A, G, or T/U |
| N | A, C, G, or T/U |

[0372] The terms “protein,” “peptide” and “polypeptide” are used interchangeably herein to refer to a sequential chain of amino acids linked together via peptide bonds. The terms include individual proteins, groups or complexes of proteins that associate together, as well as fragments, variants, derivatives and analogs of such proteins. Peptide sequences are presented using conventional notation, beginning with the amino or N-terminus on the left, and proceeding to the carboxyl or C-terminus on the right. Standard one-letter or three-letter abbreviations may be used.

### Methods of Altering CEP290

[0373] CEP290 encodes a centrosomal protein that plays a role in centrosome and cilia development. The CEP290 gene is involved in forming cilia around cells, particularly in the photoreceptors at the back of the retina, which are needed to detect light and color.

[0374] Disclosed herein are methods and compositions for altering the LCA10 target position in the CEP290 gene. LCA10 target position can be altered (e.g., corrected) by gene editing, e.g., using CRISPR-Cas9 mediated methods. The alteration (e.g., correction) of the mutant CEP290 gene can be mediated by any mechanism. Exemplary mechanisms that can be associated with the alteration (e.g., correction) of the mutant CEP290 gene include, but are not limited to, non-homologous end joining (e.g., classical or alternative), microhomology-mediated end joining (MMEJ), homology-directed repair (e.g., endogenous donor template mediated), SDSA (synthesis dependent strand annealing), single strand annealing or single strand invasion. Methods described herein introduce one or more breaks near the site of the LCA target position (e.g., c.2991+1655A to G) in at least one allele of the CEP290 gene. In an embodiment, the one or more breaks are repaired by NHEJ. During repair of the one or more breaks, DNA sequences are inserted and/or deleted resulting in the loss or destruction of the cryptic splice site resulting from the mutation at the LCA10 target position (e.g., c.2991+1655A to G). The method can include acquiring knowledge of the mutation carried by the subject, e.g., by sequencing the appropriate portion of the CEP290 gene.

[0375] Altering the LCA10 target position refers to (1) break-induced introduction of an indel (also referred to herein as NHEJ-mediated introduction of an indel) in close proximity to or including a LCA10 target position (e.g., c.2991+1655A to G), or (2) break-induced deletion (also referred to herein as NHEJ-mediated deletion) of genomic sequence including the mutation at a LCA10 target position (e.g., c.2991+1655A to G). Both approaches give rise to the loss or destruction of the cryptic splice site.

[0376] In an embodiment, the method comprises introducing a break-induced indel in close proximity to or including the LCA10 target position (e.g., c.2991+1655A to G). As described herein, in one embodiment, the method comprises the introduction of a double strand break sufficiently close to (e.g., either 5′ or 3′ to) the LCA10 target position, e.g., c.2991+1655A to G, such that the break-induced indel could be reasonably expected to span the mutation. A single gRNAs, e.g., unimolecular (or chimeric) or modular gRNA molecules, is configured to position a double strand break sufficiently close to the LCA10 target position in the CEP290 gene. In an embodiment, the break is positioned to avoid unwanted target chromosome elements, such as repeat elements, e.g., an Alu repeat. The double strand break may be positioned within 40 nucleotides (e.g., within 1, 2, 3, 4, 5, 10, 15, 16, 17, 18, 19, 20, 25, 30, 35 or 40 nucleotides) upstream of the LCA10 target position, or within 40 nucleotides (e.g., within 1, 2, 3, 4, 5, 10, 15, 16, 17, 18, 19, 20, 25, 30, 35 or 40 nucleotides) downstream of the LCA10 target position (see FIG. 9). While not wishing to be bound by theory, in an embodiment, it is believed that NHEJ-mediated repair of the double strand break allows for the NHEJ-mediated introduction of an indel in close proximity to or including the LCA10 target position.

[0377] In another embodiment, the method comprises the introduction of a pair of single strand breaks sufficiently close to (either 5′ or 3′ to, respectively) the mutation at the LCA10 target position (e.g., c.2991+1655A to G) such that the break-induced indel could be reasonably expected to span the mutation. Two gRNAs, e.g., unimolecular (or chimeric) or modular gRNA molecules, are configured to position the two single strand breaks sufficiently close to the LCA10 target position in the CEP290 gene. In an embodiment, the breaks are positioned to avoid unwanted target chromosome elements, such as repeat elements, e.g., an Alu repeat. In an embodiment, the pair of single strand breaks is positioned within 40 nucleotides (e.g., within 1, 2, 3, 4, 5, 10, 15, 16, 17, 18, 19, 20, 25, 30, 35 or 40 nucleotides) upstream of the LCA10 target position, or within 40 nucleotides (e.g., within 1, 2, 3, 4, 5, 10, 15, 16, 17, 18, 19, 20, 25, 30, 35 or 40 nucleotides) downstream of the LCA10 target position (see FIG. 9). While not wishing to be bound by theory, in an embodiment, it is believed that NHEJ mediated repair of the pair of single strand breaks allows for the NHEJ-mediated introduction of an indel in close proximity to or including the LCA10 target position. In an embodiment, the pair of single strand breaks may be accompanied by an additional double strand break, positioned by a third gRNA molecule, as is discussed below. In another embodiment, the pair of single strand breaks may be accompanied by two additional single strand breaks positioned by a third gRNA molecule and a fourth gRNA molecule, as is discussed below.

[0378] In an embodiment, the method comprises introducing a break-induced deletion of genomic sequence including the mutation at the LCA10 target position (e.g., c.2991+1655A to G). As described herein, in one embodiment, the method comprises the introduction of two double strand breaks—one 5′ and the other 3′ to (i.e., flanking) the LCA10 target position. Two gRNAs, e.g., unimolecular (or chimeric) or modular gRNA molecules, are configured to position the two double strand breaks on opposite sides of the LCA10 target position in the CEP290 gene. In an embodiment, the first double strand break is positioned upstream of the LCA10 target position within intron 26 (e.g., within 1654 nucleotides), and the second double strand break is positioned downstream of the LCA10 target position within intron 26 (e.g., within 4183 nucleotides) (see FIG. 10). In an embodiment, the breaks (i.e., the two double strand breaks) are positioned to avoid unwanted target chromosome elements, such as repeat elements, e.g., an Alu repeat, or the endogenous CEP290 splice sites.

[0379] The first double strand break may be positioned as follows:
[0380] (1) upstream of the 5′ end of the Alu repeat in intron 26,
[0381] (2) between the 3′ end of the Alu repeat and the LCA10 target position in intron 26, or
[0382] (3) within the Alu repeat provided that a sufficient length of the gRNA fall outside of the repeat so as to avoid binding to other Alu repeats in the genome,
   and the second double strand break to be paired with the first double strand break may be positioned downstream of the LCA10 target position in intron 26.

[0383] For example, the first double strand break may be positioned:
[0384] (1) within 1162 nucleotides upstream of the 5′ end of the Alu repeat,
[0385] (2) within 1000 nucleotides upstream of the 5′ end of the Alu repeat,
[0386] (3) within 900 nucleotides upstream of the 5′ end of the Alu repeat,
[0387] (4) within 800 nucleotides upstream of the 5′ end of the Alu repeat,
[0388] (5) within 700 nucleotides upstream of the 5′ end of the Alu repeat,
[0389] (6) within 600 nucleotides upstream of the 5′ end of the Alu repeat,
[0390] (7) within 500 nucleotides upstream of the 5′ end of the Alu repeat,
[0391] (8) within 400 nucleotides upstream of the 5′ end of the Alu repeat,
[0392] (9) within 300 nucleotides upstream of the 5′ end of the Alu repeat,
[0393] (10) within 200 nucleotides upstream of the 5′ end of the Alu repeat,
[0394] (11) within 100 nucleotides upstream of the 5′ end of the Alu repeat,
[0395] (12) within 50 nucleotides upstream of the 5′ end of the Alu repeat,
[0396] (13) within the Alu repeat provided that a sufficient length of the gRNA falls outside of the repeat so as to avoid binding to other Alu repeats in the genome,
[0397] (14) within 40 nucleotides (e.g., within 1, 2, 3, 4, 5, 10, 15, 16, 17, 18, 19, 20, 25, 30, 35 or 40 nucleotides) upstream of the LCA10 target position, or
[0398] (15) within 17 nucleotides (e.g., within 1, 2, 3, 4, 5, 10, 15, 16 or 17 nucleotides) upstream of the LCA10 target position,
   and the second double strand breaks to be paired with the first double strand break may be positioned:
[0399] (1) within 4183 nucleotides downstream of the LCA10 target position,
[0400] (2) within 4000 nucleotides downstream of the LCA10 target position,
[0401] (3) within 3000 nucleotides downstream of the LCA10 target position,
[0402] (4) within 2000 nucleotides downstream of the LCA10 target position,
[0403] (5) within 1000 nucleotides downstream of the LCA10 target position,
[0404] (6) within 700 nucleotides downstream of the LCA10 target position,
[0405] (7) within 500 nucleotides downstream of the LCA10 target position,
[0406] (8) within 300 nucleotides downstream of the LCA10 target position,
[0407] (9) within 100 nucleotides downstream of the LCA10 target position,
[0408] (10) within 60 nucleotides downstream of the LCA10 target position, or
[0409] (11) within 40 (e.g., 1, 2, 3, 4, 5, 10, 15, 20, 25, 30, 35 or 40 nucleotides) nucleotides downstream of the LCA10 target position.

[0410] While not wishing to be bound by theory, in an embodiment, it is believed that the two double strand breaks allow for break-induced deletion of genomic sequence including the mutation at the LCA10 target position in the CEP290 gene.

[0411] The method also comprises the introduction of two sets of breaks, e.g., one double strand break (either 5′ or 3′ to the mutation at the LCA10 target position, e.g., c.2991+1655A to G) and a pair of single strand breaks (on the other side of the LCA10 target position opposite from the double strand break) such that the two sets of breaks are positioned to flank the LCA10 target position. Three gRNAs, e.g., unimolecular (or chimeric) or modular gRNA molecules, are configured to position the one double strand break and the pair of single strand breaks on opposite sides of the LCA10 target position in the CEP290 gene. In an embodiment, the first set of breaks (either the double strand break or the pair of single strand breaks) is positioned upstream of the LCA10 target position within intron 26 (e.g., within 1654 nucleotides), and the second set of breaks (either the double strand break or the pair of single strand breaks) are positioned downstream of the LCA10 target position within intron 26 (e.g., within 4183 nucleotides) (see FIG. 10). In an embodiment, the two sets of breaks (i.e., the double strand break and the pair of single strand breaks) are positioned to avoid unwanted target chromosome elements, such as repeat elements, e.g., an Alu repeat, or the endogenous CEP290 splice sites.

[0412] The first set of breaks (either the double strand break or the pair of single strand breaks) may be positioned:
[0413] (1) upstream of the 5′ end of the Alu repeat in intron 26,
[0414] (2) between the 3′ end of the Alu repeat and the LCA10 target position in intron 26, or
[0415] (3) within the Alu repeat provided that a sufficient length of the gRNA falls outside of the repeat so as to avoid binding to other Alu repeats in the genome,
   and the second set of breaks to be paired with the first set of breaks (either the double strand break or the pair of single strand breaks) may be positioned downstream of the LCA10 target position in intron 26.

[0416] For example, the first set of breaks (either the double strand break or the pair of single strand breaks) may be positioned:
[0417] (1) within 1162 nucleotides upstream of the 5′ end of the Alu repeat,
[0418] (2) within 1000 nucleotides upstream of the 5′ end of the Alu repeat,
[0419] (3) within 900 nucleotides upstream of the 5′ end of the Alu repeat,
[0420] (4) within 800 nucleotides upstream of the 5′ end of the Alu repeat,
[0421] (5) within 700 nucleotides upstream of the 5′ end of the Alu repeat,
[0422] (6) within 600 nucleotides upstream of the 5′ end of the Alu repeat,
[0423] (7) within 500 nucleotides upstream of the 5′ end of the Alu repeat,
[0424] (8) within 400 nucleotides upstream of the 5′ end of the Alu repeat,
[0425] (9) within 300 nucleotides upstream of the 5′ end of the Alu repeat,
[0426] (10) within 200 nucleotides upstream of the 5′ end of the Alu repeat,
[0427] (11) within 100 nucleotides upstream of the 5′ end of the Alu repeat,
[0428] (12) within 50 nucleotides upstream of the 5′ end of the Alu repeat,
[0429] (13) within the Alu repeat provided that a sufficient length of the gRNA falls outside of the repeat so as to avoid binding to other Alu repeats in the genome,
[0430] (14) within 40 nucleotides (e.g., within 1, 2, 3, 4, 5, 10, 15, 16, 17, 18, 19, 20, 25, 30, 35 or 40 nucleotides) upstream of the LCA10 target position, or
[0431] (15) within 17 nucleotides (e.g., within 1, 2, 3, 4, 5, 10, 15, 16 or 17 nucleotides) upstream of the LCA10 target position,
   and the second set of breaks to be paired with the first set of breaks (either the double strand break or the pair of single strand breaks) may be positioned:
[0432] (1) within 4183 nucleotides downstream of the LCA10 target position,
[0433] (2) within 4000 nucleotides downstream of the LCA10 target position,
[0434] (3) within 3000 nucleotides downstream of the LCA10 target position,
[0435] (4) within 2000 nucleotides downstream of the LCA10 target position,
[0436] (5) within 1000 nucleotides downstream of the LCA10 target position,
[0437] (6) within 700 nucleotides downstream of the LCA10 target position,
[0438] (7) within 500 nucleotides downstream of the LCA10 target position,
[0439] (8) within 300 nucleotides downstream of the LCA10 target position,
[0440] (9) within 100 nucleotides downstream of the LCA10 target position,
[0441] (10) within 60 nucleotides downstream of the LCA10 target position, or
[0442] (11) within 40 (e.g., 1, 2, 3, 4, 5, 10, 15, 20, 25, 30, 35 or 40 nucleotides) nucleotides downstream of the LCA10 target position.

[0443] While not wishing to be bound by theory, it is believed that the two sets of breaks (either the double strand break or the pair of single strand breaks) allow for break-induced deletion of genomic sequence including the mutation at the LCA10 target position in the CEP290 gene.

[0444] The method also comprises the introduction of two sets of breaks, e.g., two pairs of single strand breaks, wherein the two sets of single-stranded breaks are positioned to flank the LCA10 target position. In an embodiment, the first set of breaks (e.g., the first pair of single strand breaks) is 5′ to the mutation at the LCA10 target position (e.g., c.2991+1655A to G) and the second set of breaks (e.g., the second pair of single strand breaks) is 3′ to the mutation at the LCA10 target position. Four gRNAs, e.g., unimolecular (or chimeric) or modular gRNA molecules, are configured to position the two pairs of single strand breaks on opposite sides of the LCA10 target position in the CEP290 gene. In an embodiment, the first set of breaks (e.g., the first pair of single strand breaks) is positioned upstream of the LCA10 target position within intron 26 (e.g., within 1654 nucleotides), and the second set of breaks (e.g., the second pair of single strand breaks) is positioned downstream of the LCA10 target position within intron 26 (e.g., within 4183 nucleotides) (see FIG. 10). In an embodiment, the two sets of breaks (i.e., the two pairs of single strand breaks) are positioned to avoid unwanted target chromosome elements, such as repeat elements, e.g., an Alu repeat, or the endogenous CEP290 splice sites.

[0445] The first set of breaks (e.g., the first pair of single strand breaks) may be positioned:
[0446] (1) upstream of the 5′ end of the Alu repeat in intron 26,
[0447] (2) between the 3′ end of the Alu repeat and the LCA10 target position in intron 26, or
[0448] (3) within the Alu repeat provided that a sufficient length of the gRNA falls outside of the repeat so as to avoid binding to other Alu repeats in the genome,
   and the second set of breaks to be paired with the first set of breaks (e.g., the second pair of single strand breaks) may be positioned downstream of the LCA10 target position in intron 26.

[0449] For example, the first set of breaks (e.g., the first pair of single strand breaks) may be positioned:
[0450] (1) within 1162 nucleotides upstream of the 5′ end of the Alu repeat,
[0451] (2) within 1000 nucleotides upstream of the 5′ end of the Alu repeat,
[0452] (3) within 900 nucleotides upstream of the 5′ end of the Alu repeat,
[0453] (4) within 800 nucleotides upstream of the 5′ end of the Alu repeat,
[0454] (5) within 700 nucleotides upstream of the 5′ end of the Alu repeat,
[0455] (6) within 600 nucleotides upstream of the 5′ end of the Alu repeat,
[0456] (7) within 500 nucleotides upstream of the 5′ end of the Alu repeat,
[0457] (8) within 400 nucleotides upstream of the 5′ end of the Alu repeat,
[0458] (9) within 300 nucleotides upstream of the 5′ end of the Alu repeat,
[0459] (10) within 200 nucleotides upstream of the 5′ end of the Alu repeat,
[0460] (11) within 100 nucleotides upstream of the 5′ end of the Alu repeat,
[0461] (12) within 50 nucleotides upstream of the 5′ end of the Alu repeat,
[0462] (13) within the Alu repeat provided that a sufficient length of the gRNA falls outside of the repeat so as to avoid binding to other Alu repeats in the genome,
[0463] (14) within 40 nucleotides (e.g., within 1, 2, 3, 4, 5, 10, 15, 16, 17, 18, 19, 20, 25, 30, 35 or 40 nucleotides) upstream of the LCA10 target position, or
[0464] (15) within 17 nucleotides (e.g., within 1, 2, 3, 4, 5, 10, 15, 16 or 17 nucleotides) upstream of the LCA10 target position,
   and the second set of breaks to be paired with the first set of breaks (e.g., the second pair of single strand breaks) may be positioned:
[0465] (1) within 4183 nucleotides downstream of the LCA10 target position,
[0466] (2) within 4000 nucleotides downstream of the LCA10 target position,
[0467] (3) within 3000 nucleotides downstream of the LCA10 target position,
[0468] (4) within 2000 nucleotides downstream of the LCA10 target position,
[0469] (5) within 1000 nucleotides downstream of the LCA10 target position,
[0470] (6) within 700 nucleotides downstream of the LCA10 target position,
[0471] (7) within 500 nucleotides downstream of the LCA10 target position,
[0472] (8) within 300 nucleotides downstream of the LCA10 target position,
[0473] (9) within 100 nucleotides downstream of the LCA10 target position,
[0474] (10) within 60 nucleotides downstream of the LCA10 target position, or
[0475] (11) within 40 (e.g., 1, 2, 3, 4, 5, 10, 15, 20, 25, 30, 35 or 40 nucleotides) nucleotides downstream of the LCA10 target position.

[0476] While not wishing to be bound by theory, it is believed that the two sets of breaks (e.g., the two pairs of single strand breaks) allow for break-induced deletion of genomic sequence including the mutation at the LCA10 target position in the CEP290 gene.

### Methods of Treating or Preventing LCA10

[0477] Described herein are methods for treating or delaying the onset or progression of Leber's Congenital Amaurosis 10 (LCA10) caused by a c.2991+1655 A to G (adenine to guanine) mutation in the CEP290 gene. The disclosed methods for treating or delaying the onset or progression of LCA10 alter the CEP290 gene by genome editing using a gRNA targeting the LCA10 target position and a Cas9 enzyme. Details on gRNAs targeting the LCA10 target position and Cas9 enzymes are provided below.

[0478] In an embodiment, treatment is initiated prior to onset of the disease.

[0479] In an embodiment, treatment is initiated after onset of the disease.

[0480] In an embodiment, treatment is initiated prior to loss of visual acuity and/or sensitivity to glare.

[0481] In an embodiment, treatment is initiated at onset of loss of visual acuity.

[0482] In an embodiment, treatment is initiated after onset of loss of visual acuity and/or sensitivity to glare.

[0483] In an embodiment, treatment is initiated in utero.

[0484] In an embodiment, treatment is initiated after birth.

[0485] In an embodiment, treatment is initiated prior to the age of 1.

[0486] In an embodiment, treatment is initiated prior to the age of 2.

[0487] In an embodiment, treatment is initiated prior to the age of 5.

[0488] In an embodiment, treatment is initiated prior to the age of 10.

[0489] In an embodiment, treatment is initiated prior to the age of 15.

[0490] In an embodiment, treatment is initiated prior to the age of 20.

[0491] A subject's vision can evaluated, e.g., prior to treatment, or after treatment, e.g., to monitor the progress of the treatment. In an embodiment, the subject's vision is evaluated prior to treatment, e.g., to determine the need for treatment. In an embodiment, the subject's vision is evaluated after treatment has been initiated, e.g., to access the effectiveness of the treatment. Vision can be evaluated by one or more of: evaluating changes in function relative to the contralateral eye, e.g., by utilizing retinal analytical techniques; by evaluating mean, median and distribution of change in best corrected visual acuity (BCVA); evaluation by Optical Coherence Tomography; evaluation of changes in visual field using perimetry; evaluation by full-field electroretinography (ERG); evaluation by slit lamp examination; evaluation of intraocular pressure; evaluation of autofluorescence, evaluation with fundoscopy; evaluation with fundus photography; evaluation with fluorescein angiography (FA); or evaluation of visual field sensitivity (FFST).

[0492] In an embodiment, a subject's vision may be assessed by measuring the subject's mobility, e.g., the subject's ability to maneuver in space.

[0493] In an embodiment, treatment is initiated in a subject who has tested positive for a mutation in the CEP290 gene, e.g., prior to disease onset or in the earliest stages of disease.

[0494] In an embodiment, a subject has a family member that has been diagnosed with LCA10. For example, the subject has a family member that has been diagnosed with LCA10, and the subject demonstrates a symptom or sign of the disease or has been found to have a mutation in the CEP290 gene.

[0495] In an embodiment, a cell (e.g., a retinal cell, e.g., a photoreceptor cell) from a subject suffering from or likely to develop LCA10 is treated ex vivo. In an embodiment, the cell is removed from the subject, altered as described herein, and introduced into, e.g., returned to, the subject.

[0496] In an embodiment, a cell (e.g., a retinal cell, e.g., a photoreceptor cell) altered to correct a mutation in the LCA10 target position is introduced into the subject.

[0497] In an embodiment, the cell is a retinal cell (e.g., retinal pigment epithelium cell), a photoreceptor cell, a horizontal cell, a bipolar cell, an amacrine cell, or a ganglion cell. In an embodiment, it is contemplated herein that a population of cells (e.g., a population of retinal cells, e.g., a population of photoreceptor cells) from a subject may be contacted ex vivo to alter a mutation in CEP290, e.g., a 2991+1655 A to G. In an embodiment, such cells are introduced to the subject's body to prevent or treat LCA10.

[0498] In an embodiment, the population of cells are a population of retinal cells (e.g., retinal pigment epithelium cells), photoreceptor cells, horizontal cells, bipolar cells, amacrine cells, ganglion cells, or a combination thereof.

[0499] In an embodiment, the method described herein comprises delivery of gRNA or other components described herein, e.g., a Cas9 molecule, by one or more AAV vectors, e.g., one or more AAV vectors described herein.

### I. Genome Editing Systems

[0500] The term “genome editing system” refers to any system having RNA-guided DNA editing activity. Genome editing systems of the present disclosure include at least two components adapted from naturally occurring CRISPR systems: a gRNA and an RNA-guided nuclease. These two components form a complex that is capable of associating with a specific nucleic acid sequence in a cell and editing the DNA in or around that nucleic acid sequence, for example by making one or more of a single-strand break (an SSB or nick), a double-strand break (a DSB) and/or a base substitution.

[0501] Naturally occurring CRISPR systems are organized evolutionarily into two classes and five types (Makarova 2011, incorporated by reference herein), and while genome editing systems of the present disclosure may adapt components of any type or class of naturally occurring CRISPR system, the embodiments presented herein are generally adapted from Class 2, and type II or V CRISPR systems. Class 2 systems, which encompass types II and V, are characterized by relatively large, multidomain RNA-guided nuclease proteins (e.g., Cas9 or Cpf1) that form ribonucleoprotein (RNP) complexes with gRNAs. gRNAs, which are discussed in greater detail below, can include single crRNAs in the case of Cpf1 or duplexed crRNAs and tracrRNAs in the case of Cas9. RNP complexes, in turn, associate with (i.e., target) and cleave specific loci complementary to a targeting (or spacer) sequence of the crRNA. Genome editing systems according to the present disclosure similarly target and edit cellular DNA sequences, but differ significantly from CRISPR systems occurring in nature. For example, the unimolecular gRNAs described herein do not occur in nature, and both gRNAs and RNA-guided nucleases according to this disclosure can incorporate any number of non-naturally occurring modifications.

[0502] Genome editing systems can be implemented in a variety of ways, and different implementations may be suitable for any particular application. For example, a genome editing system is implemented, in certain embodiments, as a protein/RNA complex (a ribonucleoprotein, or RNP), which can be included in a pharmaceutical composition that optionally includes a pharmaceutically acceptable carrier and/or an encapsulating agent, such as a lipid or polymer micro- or nano-particle, micelle, liposome, etc. In other embodiments, a genome editing system is implemented as one or more nucleic acids encoding the RNA-guided nuclease and gRNA components described above (optionally with one or more additional components); in still other embodiments, the genome editing system is implemented as one or more vectors comprising such nucleic acids, for example a viral vector such as an AAV; and in still other embodiments, the genome editing system is implemented as a combination of any of the foregoing. Additional or modified implementations that operate according to the principles set forth herein will be apparent to the skilled artisan and are within the scope of this disclosure.

[0503] It should be noted that the genome editing systems of the present invention can be targeted to a single specific nucleotide sequence, or can be targeted to—and capable of editing in parallel—two or more specific nucleotide sequences through the use of two or more gRNAs. The use of two or more gRNAs targeted to different sites is referred to as “multiplexing” throughout this disclosure, and can be employed to target multiple, unrelated target sequences of interest, or to form multiple SSBs and/or DSBs within a single target domain and, in some cases, to generate specific edits within such target domain. For example, this disclosure and International Patent Publication No. WO2015/138510 by Maeder et al. (“Maeder”), which is incorporated by reference herein, both describe a genome editing system for correcting a point mutation (C.2991+1655A to G) in the human CEP290 gene that results in the creation of a cryptic splice site, which in turn reduces or eliminates the function of the gene. The genome editing system of Maeder utilizes two gRNAs targeted to sequences on either side of (i.e., flanking) the point mutation, and forms DSBs that flank the mutation. This, in turn, promotes deletion of the intervening sequence, including the mutation, thereby eliminating the cryptic splice site and restoring normal gene function.

[0504] As another example, International Patent Publication No. WO2016/073990 by Cotta-Ramusino et al. (“Cotta-Ramusino”), incorporated by reference herein, describes a genome editing system that utilizes two gRNAs in combination with a Cas9 nickase (a Cas9 that makes a single strand nick such as S. pyogenes D10A), an arrangement termed a “dual-nickase system.” The dual-nickase system of Cotta-Ramusino is configured to make two nicks on opposite strands of a sequence of interest that are offset by one or more nucleotides, which nicks combine to create a double strand break having an overhang (5′ in the case of Cotta-Ramusino, though 3′ overhangs are also possible). The overhang, in turn, can facilitate homology directed repair events in some circumstances. As another example, International Patent Publication No. WO2015/070083 by Zhang et al., incorporated by reference herein, describes a gRNA targeted to a nucleotide sequence encoding Cas9 (referred to as a “governing” gRNA), which can be included in a genome editing system comprising one or more additional gRNAs to permit transient expression of a Cas9 that might otherwise be constitutively expressed, for example in some virally transduced cells. These multiplexing applications are intended to be exemplary, rather than limiting, and the skilled artisan will appreciate that other applications of multiplexing are generally compatible with the genome editing systems described here.

[0505] Genome editing systems can, in some instances, form double strand breaks that are repaired by cellular DNA double-strand break mechanisms such as non-homologous end joining (NHEJ), or homology directed repair (HDR). These mechanisms are described throughout the literature (see, e.g., Davis 2014 (describing Alt-HDR), Frit 2014 (describing Alt-NHEJ), and Iyama 2013 (describing canonical HDR and NHEJ pathways generally), all of which are incorporated by reference herein).

[0506] Where genome editing systems operate by forming DSBs, such systems optionally include one or more components that promote or facilitate a particular mode of double-strand break repair or a particular repair outcome. For example, Cotta-Ramusino also describes genome editing systems in which a single stranded oligonucleotide “donor template” is added; the donor template is incorporated into a target region of cellular DNA that is cleaved by the genome editing system, and can result in a change in the target sequence.

[0507] In other cases, genome editing systems modify a target sequence, or modify expression of a gene in or near the target sequence, without causing single- or double-strand breaks. For example, a genome editing system can include an RNA-guided nuclease/cytidine deaminase fusion protein, and can operate by generating targeted C-to-A substitutions. Suitable nuclease/deaminase fusions are described in Komor 2016, which is incorporated by reference. Alternatively, a genome editing system can utilize a cleavage-inactivated (i.e., a “dead”) nuclease, such as a dead Cas9, and can operate by forming stable complexes on one or more targeted regions of cellular DNA, thereby interfering with functions involving the targeted region(s) such as mRNA transcription and chromatin remodeling.

II. gRNA Molecules

[0508] The terms guide RNA and gRNA refer to any nucleic acid that promotes the specific association (or “targeting”) of an RNA-guided nuclease such as a Cas9 or a Cpf1 to a target sequence such as a genomic or episomal sequence in a cell. gRNAs can be unimolecular (comprising a single RNA molecule, and referred to alternatively as chimeric), or modular (comprising more than one, and typically two, separate RNA molecules, such as a crRNA and a tracrRNA, which are usually associated with one another, for example by duplexing). gRNAs and their component parts are described throughout the literature (see, e.g., Briner 2014, which is incorporated by reference; see also Cotta-Ramusino).

[0509] In bacteria and archea, type II CRISPR systems generally comprise an RNA-guided nuclease protein such as Cas9, a CRISPR RNA (crRNA) that includes a 5′ region that is complementary to a foreign sequence, and a trans-activating crRNA (tracrRNA) that includes a 5′ region that is complementary to, and forms a duplex with, a 3′ region of the crRNA. While not intending to be bound by any theory, it is thought that this duplex facilitates the formation of—and is necessary for the activity of—the Cas9/gRNA complex. As type II CRISPR systems were adapted for use in gene editing, it was discovered that the crRNA and tracrRNA could be joined into a single unimolecular or chimeric gRNA, for example by means of a four nucleotide (e.g., GAAA) “tetraloop” or “linker” sequence bridging complementary regions of the crRNA (at its 3′ end) and the tracrRNA (at its 5′ end) (Mali 2013; Jiang 2013; Jinek 2012; all incorporated by reference herein).

[0510] gRNAs, whether unimolecular or modular, include a targeting domain that is fully or partially complementary to a target domain within a target sequence, such as a DNA sequence in the genome of a cell where editing is desired. In certain embodiments, this target sequence encompasses or is proximal to a CEP290 target position. Targeting domains are referred to by various names in the literature, including without limitation “guide sequences” (Hsu 2013, incorporated by reference herein), “complementarity regions” (Cotta-Ramusino), “spacers” (Briner 2014), and generically as “crRNAs” (Jiang 2013). Irrespective of the names they are given, targeting domains are typically 10-30 nucleotides in length, preferably 16-24 nucleotides in length (for example, 16, 17, 18, 19, 20, 21, 22, 23 or 24 nucleotides in length), and are at or near the 5′ terminus of in the case of a Cas9 gRNA, and at or near the 3′ terminus in the case of a Cpf1 gRNA.

[0511] In addition to the targeting domains, gRNAs typically (but not necessarily, as discussed below) include a plurality of domains that influence the formation or activity of gRNA/Cas9 complexes. For example, as mentioned above, the duplexed structure formed by first and secondary complementarity domains of a gRNA (also referred to as a repeat:anti-repeat duplex) interacts with the recognition (REC) lobe of Cas9 and may mediate the formation of Cas9/gRNA complexes (Nishimasu 2014; Nishimasu 2015; both incorporated by reference herein). It should be noted that the first and/or second complementarity domains can contain one or more poly-A tracts, which can be recognized by RNA polymerases as a termination signal. The sequence of the first and second complementarity domains are, therefore, optionally modified to eliminate these tracts and promote the complete in vitro transcription of gRNAs, for example through the use of A-G swaps as described in Briner 2014, or A-U swaps. These and other similar modifications to the first and second complementarity domains are within the scope of the present disclosure.

[0512] Along with the first and second complementarity domains, Cas9 gRNAs typically include two or more additional duplexed regions that are necessary for nuclease activity in vivo but not necessarily in vitro (Nishimasu 2015). A first stem-loop near the 3′ portion of the second complementarity domain is referred to variously as the “proximal domain” (Cotta-Ramusino) “stem loop 1” (Nishimasu 2014; Nishimasu 2015) and the “nexus” (Briner 2014). One or more additional stem loop structures are generally present near the 3′ end of the gRNA, with the number varying by species: S. pyogenes gRNAs typically include two 3′ stem loops (for a total of four stem loop structures including the repeat:anti-repeat duplex), while S. aureus and other species have only one (for a total of three). A description of conserved stem loop structures (and gRNA structures more generally) organized by species is provided in Briner 2014.

[0513] Skilled artisans will appreciate that gRNAs can be modified in a number of ways, some of which are described below, and these modifications are within the scope of disclosure. For economy of presentation in this disclosure, gRNAs may be presented by reference solely to their targeting domain sequences.

[0514] A gRNA molecule comprises a number of domains. The gRNA molecule domains are described in more detail below.

[0515] Several exemplary gRNA structures, with domains indicated thereon, are provided in FIG. 1. While not wishing to be bound by theory, with regard to the three dimensional form, or intra- or inter-strand interactions of an active form of a gRNA, regions of high complementarity are sometimes shown as duplexes in FIG. 1 and other depictions provided herein.

[0516] In an embodiment, a unimolecular, or chimeric, gRNA comprises, preferably from 5′ to 3′:
[0517] a targeting domain (which is complementary to a target nucleic acid in the CEP290 gene, e.g., a targeting domain from any of Tables 2A-2D, Tables 3A-3C, Tables 4A-4D, Tables 5A-5D, Tables 6A-6B, Tables 7A-7D, Tables 8A-8D, Tables 9A-9E, Tables 10A-10B, or Table 11);
[0518] a first complementarity domain;
[0519] a linking domain;
[0520] a second complementarity domain (which is complementary to the first complementarity domain);
[0521] a proximal domain; and
[0522] optionally, a tail domain.

[0523] In an embodiment, a modular gRNA comprises:
[0524] a first strand comprising, preferably from 5′ to 3′;
   [0525] a targeting domain (which is complementary to a target nucleic acid in the CEP290 gene, e.g., a targeting domain from Tables 2A-2D, Tables 3A-3C, Tables 4A-4D, Tables 5A-5D, Tables 6A-6B, Tables 7A-7D, Tables 8A-8D, Tables 9A-9E, Tables 10A-10B, or Table 11); and
   [0526] a first complementarity domain; and
[0527] a second strand, comprising, preferably from 5′ to 3′:
   [0528] optionally, a 5′ extension domain;
   [0529] a second complementarity domain;
   [0530] a proximal domain; and
   [0531] optionally, a tail domain.

[0532] The domains are discussed briefly below.

### Targeting Domain

[0533] FIGS. 1A-1G provide examples of the placement of targeting domains.

[0534] The targeting domain comprises a nucleotide sequence that is complementary, e.g., at least 80, 85, 90, or 95% complementary, e.g., fully complementary, to the target sequence on the target nucleic acid. The targeting domain is part of an RNA molecule and will therefore comprise the base uracil (U), while any DNA encoding the gRNA molecule will comprise the base thymine (T). While not wishing to be bound by theory, in an embodiment, it is believed that the complementarity of the targeting domain with the target sequence contributes to specificity of the interaction of the gRNA molecule/Cas9 molecule complex with a target nucleic acid. It is understood that in a targeting domain and target sequence pair, the uracil bases in the targeting domain will pair with the adenine bases in the target sequence. In an embodiment, the target domain itself comprises in the 5′ to 3′ direction, an optional secondary domain, and a core domain. In an embodiment, the core domain is fully complementary with the target sequence. In an embodiment, the targeting domain is 5 to 50 nucleotides in length. The strand of the target nucleic acid with which the targeting domain is complementary is referred to herein as the complementary strand. Some or all of the nucleotides of the domain can have a modification, e.g., a modification found in Section VIII herein.

[0535] In an embodiment, the targeting domain is 16 nucleotides in length.

[0536] In an embodiment, the targeting domain is 17 nucleotides in length.

[0537] In an embodiment, the targeting domain is 18 nucleotides in length.

[0538] In an embodiment, the targeting domain is 19 nucleotides in length.

[0539] In an embodiment, the targeting domain is 20 nucleotides in length.

[0540] In an embodiment, the targeting domain is 21 nucleotides in length.

[0541] In an embodiment, the targeting domain is 22 nucleotides in length.

[0542] In an embodiment, the targeting domain is 23 nucleotides in length.

[0543] In an embodiment, the targeting domain is 24 nucleotides in length.

[0544] In an embodiment, the targeting domain is 25 nucleotides in length.

[0545] In an embodiment, the targeting domain is 26 nucleotides in length.

[0546] In an embodiment, the targeting domain comprises 16 nucleotides.

[0547] In an embodiment, the targeting domain comprises 17 nucleotides.

[0548] In an embodiment, the targeting domain comprises 18 nucleotides.

[0549] In an embodiment, the targeting domain comprises 19 nucleotides.

[0550] In an embodiment, the targeting domain comprises 20 nucleotides.

[0551] In an embodiment, the targeting domain comprises 21 nucleotides.

[0552] In an embodiment, the targeting domain comprises 22 nucleotides.

[0553] In an embodiment, the targeting domain comprises 23 nucleotides.

[0554] In an embodiment, the targeting domain comprises 24 nucleotides.

[0555] In an embodiment, the targeting domain comprises 25 nucleotides.

[0556] In an embodiment, the targeting domain comprises 26 nucleotides.

[0557] Targeting domains are discussed in more detail below.

### First Complementarity Domain

[0558] FIGS. 1A-1G provide examples of first complementarity domains.

[0559] The first complementarity domain is complementary with the second complementarity domain, and in an embodiment, has sufficient complementarity to the second complementarity domain to form a duplexed region under at least some physiological conditions. In an embodiment, the first complementarity domain is 5 to 30 nucleotides in length. In an embodiment, the first complementarity domain is 5 to 25 nucleotides in length. In an embodiment, the first complementary domain is 7 to 25 nucleotides in length. In an embodiment, the first complementary domain is 7 to 22 nucleotides in length. In an embodiment, the first complementary domain is 7 to 18 nucleotides in length. In an embodiment, the first complementary domain is 7 to 15 nucleotides in length. In an embodiment, the first complementary domain is 5, 6, 7, 8, 9, 10, 11, 12, 13, 14, 15, 16, 17, 18, 19, 20, 21, 22, 23, 24, or 25 nucleotides in length.

[0560] In an embodiment, the first complementarity domain comprises 3 subdomains, which, in the 5′ to 3′ direction are: a 5′ subdomain, a central subdomain, and a 3′ subdomain. In an embodiment, the 5′ subdomain is 4-9, e.g., 4, 5, 6, 7, 8 or 9 nucleotides in length. In an embodiment, the central subdomain is 1, 2, or 3, e.g., 1, nucleotide in length. In an embodiment, the 3′ subdomain is 3 to 25, e.g., 4-22, 4-18, or 4 to 10, or 3, 4, 5, 6, 7, 8, 9, 10, 11, 12, 13, 14, 15, 16, 17, 18, 19, 20, 21, 22, 23, 24, or 25, nucleotides in length.

[0561] The first complementarity domain can share homology with, or be derived from, a naturally occurring first complementarity domain. In an embodiment, it has at least 50% homology with a first complementarity domain disclosed herein, e.g., an S. pyogenes, S. aureus, or S. thermophilus, first complementarity domain.

[0562] Some or all of the nucleotides of the domain can have a modification, e.g., a modification found in Section VIII herein.

[0563] First complementarity domains are discussed in more detail below.

### Linking Domain

[0564] FIGS. 1A-1G provide examples of linking domains.

[0565] A linking domain serves to link the first complementarity domain with the second complementarity domain of a unimolecular gRNA. The linking domain can link the first and second complementarity domains covalently or non-covalently. In an embodiment, the linkage is covalent. In an embodiment, the linking domain covalently couples the first and second complementarity domains, see, e.g., FIGS. 1B-1E. In an embodiment, the linking domain is, or comprises, a covalent bond interposed between the first complementarity domain and the second complementarity domain. Typically the linking domain comprises one or more, e.g., 2, 3, 4, 5, 6, 7, 8, 9, or 10 nucleotides.

[0566] In modular gRNA molecules the two molecules are associated by virtue of the hybridization of the complementarity domains see e.g., FIG. 1A.

[0567] A wide variety of linking domains are suitable for use in unimolecular gRNA molecules. Linking domains can consist of a covalent bond, or be as short as one or a few nucleotides, e.g., 1, 2, 3, 4, or 5 nucleotides in length. In an embodiment, a linking domain is 2, 3, 4, 5, 6, 7, 8, 9, 10, 15, 20, or 25 or more nucleotides in length. In an embodiment, a linking domain is 2 to 50, 2 to 40, 2 to 30, 2 to 20, 2 to 10, or 2 to 5 nucleotides in length. In an embodiment, a linking domain shares homology with, or is derived from, a naturally occurring sequence, e.g., the sequence of a tracrRNA that is 5′ to the second complementarity domain. In an embodiment, the linking domain has at least 50% homology with a linking domain disclosed herein.

[0568] Some or all of the nucleotides of the domain can have a modification, e.g., a modification found in Section VIII herein.

[0569] Linking domains are discussed in more detail below.

### 5′ Extension Domain

[0570] In an embodiment, a modular gRNA can comprise additional sequence, 5′ to the second complementarity domain, referred to herein as the 5′ extension domain, see, e.g., FIG. 1A. In an embodiment, the 5′ extension domain is, 2-10, 2-9, 2-8, 2-7, 2-6, 2-5, or 2-4 nucleotides in length. In an embodiment, the 5′ extension domain is 2, 3, 4, 5, 6, 7, 8, 9, or 10 or more nucleotides in length.

### Second Complementarity Domain

[0571] FIGS. 1A-1G provide examples of second complementarity domains.

[0572] The second complementarity domain is complementary with the first complementarity domain, and in an embodiment, has sufficient complementarity to the second complementarity domain to form a duplexed region under at least some physiological conditions. In an embodiment, e.g., as shown in FIGS. 1A-1B, the second complementarity domain can include sequence that lacks complementarity with the first complementarity domain, e.g., sequence that loops out from the duplexed region.

[0573] In an embodiment, the second complementarity domain is 5 to 27 nucleotides in length. In an embodiment, it is longer than the first complementarity region. In an embodiment the second complementary domain is 7 to 27 nucleotides in length. In an embodiment, the second complementary domain is 7 to 25 nucleotides in length. In an embodiment, the second complementary domain is 7 to 20 nucleotides in length. In an embodiment, the second complementary domain is 7 to 17 nucleotides in length. In an embodiment, the complementary domain is 5, 6, 7, 8, 9, 10, 11, 12, 13, 14, 15, 16, 17, 18, 19, 20, 21, 22, 23, 24, 25 or 26 nucleotides in length.

[0574] In an embodiment, the second complementarity domain comprises 3 subdomains, which, in the 5′ to 3′ direction are: a 5′ subdomain, a central subdomain, and a 3′ subdomain. In an embodiment, the 5′ subdomain is 3 to 25, e.g., 4 to 22, 4 to 18, or 4 to 10, or 3, 4, 5, 6, 7, 8, 9, 10, 11, 12, 13, 14, 15, 16, 17, 18, 19, 20, 21, 22, 23, 24, or 25 nucleotides in length. In an embodiment, the central subdomain is 1, 2, 3, 4 or 5, e.g., 3, nucleotides in length. In an embodiment, the 3′ subdomain is 4 to 9, e.g., 4, 5, 6, 7, 8 or 9 nucleotides in length.

[0575] In an embodiment, the 5′ subdomain and the 3′ subdomain of the first complementarity domain, are respectively, complementary, e.g., fully complementary, with the 3′ subdomain and the 5′ subdomain of the second complementarity domain.

[0576] The second complementarity domain can share homology with or be derived from a naturally occurring second complementarity domain. In an embodiment, it has at least 50% homology with a second complementarity domain disclosed herein, e.g., an S. pyogenes, S. aureus, or S. thermophilus, first complementarity domain.

[0577] Some or all of the nucleotides of the domain can have a modification, e.g., a modification found in Section VIII herein.

### Proximal Domain

[0578] FIGS. 1A-1G provide examples of proximal domains.

[0579] In an embodiment, the proximal domain is 5 to 20 nucleotides in length. In an embodiment, the proximal domain can share homology with or be derived from a naturally occurring proximal domain. In an embodiment, it has at least 50% homology with a proximal domain disclosed herein, e.g., an S. pyogenes, S. aureus, or S. thermophilus, proximal domain.

[0580] Some or all of the nucleotides of the domain can have a modification, e.g., a modification found in Section VIII herein.

### Tail Domain

[0581] FIGS. 1A-1G provide examples of tail domains.

[0582] As can be seen by inspection of the tail domains in FIGS. 1A and 1B-1F, a broad spectrum of tail domains are suitable for use in gRNA molecules. In an embodiment, the tail domain is 0 (absent), 1, 2, 3, 4, 5, 6, 7, 8, 9, or 10 nucleotides in length. In embodiment, the tail domain nucleotides are from or share homology with sequence from the 5′ end of a naturally occurring tail domain, see e.g., FIG. 1D or 1E. In an embodiment, the tail domain includes sequences that are complementary to each other and which, under at least some physiological conditions, form a duplexed region.

[0583] In an embodiment, the tail domain is absent or is 1 to 50 nucleotides in length. In an embodiment, the tail domain can share homology with or be derived from a naturally occurring proximal tail domain. In an embodiment, it has at least 50% homology with a tail domain disclosed herein, e.g., an S. pyogenes, S. aureus, or S. thermophilus, tail domain.

[0584] In an embodiment, the tail domain includes nucleotides at the 3′ end that are related to the method of in vitro or in vivo transcription. When a T7 promoter is used for in vitro transcription of the gRNA, these nucleotides may be any nucleotides present before the 3′ end of the DNA template. When a U6 promoter is used for in vivo transcription, these nucleotides may be the sequence UUUUUU. When alternate pol-Ill promoters are used, these nucleotides may be various numbers or uracil bases or may include alternate bases.

[0585] The domains of gRNA molecules are described in more detail below.

### Targeting Domain

[0586] The “targeting domain” of the gRNA is complementary to the “target domain” on the target nucleic acid. The strand of the target nucleic acid comprising the core domain target is referred to herein as the “complementary strand” of the target nucleic acid. Guidance on the selection of targeting domains can be found, e.g., in Fu 2014 and Sternberg 2014.

[0587] In an embodiment, the targeting domain is 16, 17, 18, 19, 20, 21, 22, 23, 24, 25 or 26 nucleotides in length. In the figures and sequence listing provided herein, targeting domains are generally shown with 20 nucleotides. In each of these instances, the targeting domain may actually be shorter or longer as disclosed herein, for example from 16 to 26 nucleotides.

[0588] In an embodiment, the targeting domain is 16 nucleotides in length.

[0589] In an embodiment, the targeting domain is 17 nucleotides in length.

[0590] In an embodiment, the targeting domain is 18 nucleotides in length.

[0591] In an embodiment, the targeting domain is 19 nucleotides in length.

[0592] In an embodiment, the targeting domain is 20 nucleotides in length.

[0593] In an embodiment, the targeting domain is 21 nucleotides in length.

[0594] In an embodiment, the targeting domain is 22 nucleotides in length.

[0595] In an embodiment, the targeting domain is 23 nucleotides in length.

[0596] In an embodiment, the targeting domain is 24 nucleotides in length.

[0597] In an embodiment, the targeting domain is 25 nucleotides in length.

[0598] In an embodiment, the targeting domain is 26 nucleotides in length.

[0599] In an embodiment, the targeting domain comprises 16 nucleotides.

[0600] In an embodiment, the targeting domain comprises 17 nucleotides.

[0601] In an embodiment, the targeting domain comprises 18 nucleotides.

[0602] In an embodiment, the targeting domain comprises 19 nucleotides.

[0603] In an embodiment, the targeting domain comprises 20 nucleotides.

[0604] In an embodiment, the targeting domain comprises 21 nucleotides.

[0605] In an embodiment, the targeting domain comprises 22 nucleotides.

[0606] In an embodiment, the targeting domain comprises 23 nucleotides.

[0607] In an embodiment, the targeting domain comprises 24 nucleotides.

[0608] In an embodiment, the targeting domain comprises 25 nucleotides.

[0609] In an embodiment, the targeting domain comprises 26 nucleotides.

[0610] In an embodiment, the targeting domain is 10+/−5, 20+/−5, 30+/−5, 40+/−5, 50+/−5, 60+/−5, 70+/−5, 80+/−5, 90+/−5, or 100+/−5 nucleotides, in length.

[0611] In an embodiment, the targeting domain is 20+/−5 nucleotides in length.

[0612] In an embodiment, the targeting domain is 20+/−10, 30+/−10, 40+/−10, 50+/−10, 60+/−10, 70+/−10, 80+/−10, 90+/−10, or 100+/−10 nucleotides, in length.

[0613] In an embodiment, the targeting domain is 30+/−10 nucleotides in length.

[0614] In an embodiment, the targeting domain is 10 to 100, 10 to 90, 10 to 80, 10 to 70, 10 to 60, 10 to 50, 10 to 40, 10 to 30, 10 to 20 or 10 to 15 nucleotides in length. In other embodiments, the targeting domain is 20 to 100, 20 to 90, 20 to 80, 20 to 70, 20 to 60, 20 to 50, 20 to 40, 20 to 30, or 20 to 25 nucleotides in length.

[0615] Typically the targeting domain has full complementarity with the target sequence. In some embodiments the targeting domain has or includes 1, 2, 3, 4, 5, 6, 7 or 8 nucleotides that are not complementary with the corresponding nucleotide of the targeting domain.

[0616] In an embodiment, the target domain includes 1, 2, 3, 4 or 5 nucleotides that are complementary with the corresponding nucleotide of the targeting domain within 5 nucleotides of its 5′ end. In an embodiment, the target domain includes 1, 2, 3, 4 or 5 nucleotides that are complementary with the corresponding nucleotide of the targeting domain within 5 nucleotides of its 3′ end.

[0617] In an embodiment, the target domain includes 1, 2, 3, or 4 nucleotides that are not complementary with the corresponding nucleotide of the targeting domain within 5 nucleotides of its 5′ end. In an embodiment, the target domain includes 1, 2, 3, or 4 nucleotides that are not complementary with the corresponding nucleotide of the targeting domain within 5 nucleotides of its 3′ end.

[0618] In an embodiment, the degree of complementarity, together with other properties of the gRNA, is sufficient to allow targeting of a Cas9 molecule to the target nucleic acid.

[0619] In some embodiments, the targeting domain comprises two consecutive nucleotides that are not complementary to the target domain (“non-complementary nucleotides”), e.g., two consecutive noncomplementary nucleotides that are within 5 nucleotides of the 5′ end of the targeting domain, within 5 nucleotides of the 3′ end of the targeting domain, or more than 5 nucleotides away from one or both ends of the targeting domain.

[0620] In an embodiment, no two consecutive nucleotides within 5 nucleotides of the 5′ end of the targeting domain, within 5 nucleotides of the 3′ end of the targeting domain, or within a region that is more than 5 nucleotides away from one or both ends of the targeting domain, are not complementary to the targeting domain.

[0621] In an embodiment, there are no noncomplementary nucleotides within 5 nucleotides of the 5′ end of the targeting domain, within 5 nucleotides of the 3′ end of the targeting domain, or within a region that is more than 5 nucleotides away from one or both ends of the targeting domain.

[0622] In an embodiment, the targeting domain nucleotides do not comprise modifications, e.g., modifications of the type provided in Section VIII. However, in an embodiment, the targeting domain comprises one or more modifications, e.g., modifications that it render it less susceptible to degradation or more bio-compatible, e.g., less immunogenic. By way of example, the backbone of the targeting domain can be modified with a phosphorothioate, or other modification(s) from Section VIII. In an embodiment, a nucleotide of the targeting domain can comprise a 2′ modification, e.g., a 2-acetylation, e.g., a 2′ methylation, or other modification(s) from Section VIII.

[0623] In some embodiments, the targeting domain includes 1, 2, 3, 4, 5, 6, 7 or 8 or more modifications. In an embodiment, the targeting domain includes 1, 2, 3, or 4 modifications within 5 nucleotides of its 5′ end. In an embodiment, the targeting domain comprises as many as 1, 2, 3, or 4 modifications within 5 nucleotides of its 3′ end.

[0624] In some embodiments, the targeting domain comprises modifications at two consecutive nucleotides, e.g., two consecutive nucleotides that are within 5 nucleotides of the 5′ end of the targeting domain, within 5 nucleotides of the 3′ end of the targeting domain, or more than 5 nucleotides away from one or both ends of the targeting domain.

[0625] In an embodiment, no two consecutive nucleotides are modified within 5 nucleotides of the 5′ end of the targeting domain, within 5 nucleotides of the 3′ end of the targeting domain, or within a region that is more than 5 nucleotides away from one or both ends of the targeting domain. In an embodiment, no nucleotide is modified within 5 nucleotides of the 5′ end of the targeting domain, within 5 nucleotides of the 3′ end of the targeting domain, or within a region that is more than 5 nucleotides away from one or both ends of the targeting domain.

[0626] Modifications in the targeting domain can be selected to not interfere with targeting efficacy, which can be evaluated by testing a candidate modification in the system described in Section V. gRNAs having a candidate targeting domain having a selected length, sequence, degree of complementarity, or degree of modification, can be evaluated in a system in Section V. The candidate targeting domain can be placed, either alone, or with one or more other candidate changes in a gRNA molecule/Cas9 molecule system known to be functional with a selected target and evaluated.

[0627] In some embodiments, all of the modified nucleotides are complementary to and capable of hybridizing to corresponding nucleotides present in the target domain. In other embodiments, 1, 2, 3, 4, 5, 6, 7 or 8 or more modified nucleotides are not complementary to or capable of hybridizing to corresponding nucleotides present in the target domain.

[0628] In an embodiment, the targeting domain comprises, preferably in the 5′→3′ direction: a secondary domain and a core domain. These domains are discussed in more detail below.

### Core Domain and Secondary Domain of the Targeting Domain

[0629] The “core domain” of the targeting domain is complementary to the “core domain target” on the target nucleic acid. In an embodiment, the core domain comprises about 8 to about 13 nucleotides from the 3′ end of the targeting domain (e.g., the most 3′ 8 to 13 nucleotides of the targeting domain).

[0630] In an embodiment, the secondary domain is absent or optional.

[0631] In an embodiment, the core domain and targeting domain, are independently, 6+/−2, 7+/−2, 8+/−2, 9+/−2, 10+/−2, 11+/−2, 12+/−2, 13+/−2, 14+/−2, 15+/−2, 16+−2, 17+/−2, or 18+/−2, nucleotides in length.

[0632] In an embodiment, the core domain and targeting domain, are independently, 10+/−2 nucleotides in length.

[0633] In an embodiment, the core domain and targeting domain, are independently, 10+/−4 nucleotides in length.

[0634] In an embodiment, the core domain and targeting domain, are independently, 6, 7, 8, 9, 10, 11, 12, 13, 14, 15, 16, 17, or 18, nucleotides in length.

[0635] In an embodiment, the core domain and targeting domain, are independently 3 to 20, 4 to 20, 5 to 20, 6 to 20, 7 to 20, 8 to 20, 9 to 20 10 to 20 or 15 to 20 nucleotides in length.

[0636] In an embodiment, the core domain and targeting domain, are independently 3 to 15, e.g., 6 to 15, 7 to 14, 7 to 13, 6 to 12, 7 to 12, 7 to 11, 7 to 10, 8 to 14, 8 to 13, 8 to 12, 8 to 11, 8 to 10 or 8 to 9 nucleotides in length.

[0637] The core domain is complementary with the core domain target. Typically the core domain has exact complementarity with the core domain target. In some embodiments, the core domain can have 1, 2, 3, 4 or 5 nucleotides that are not complementary with the corresponding nucleotide of the core domain. In an embodiment, the degree of complementarity, together with other properties of the gRNA, is sufficient to allow targeting of a Cas9 molecule to the target nucleic acid.

[0638] The “secondary domain” of the targeting domain of the gRNA is complementary to the “secondary domain target” of the target nucleic acid.

[0639] In an embodiment, the secondary domain is positioned 5′ to the core domain.

[0640] In an embodiment, the secondary domain is absent or optional.

[0641] In an embodiment, if the targeting domain is 26 nucleotides in length and the core domain (counted from the 3′ end of the targeting domain) is 8 to 13 nucleotides in length, the secondary domain is 12 to 17 nucleotides in length.

[0642] In an embodiment, if the targeting domain is 25 nucleotides in length and the core domain (counted from the 3′ end of the targeting domain) is 8 to 13 nucleotides in length, the secondary domain is 12 to 17 nucleotides in length.

[0643] In an embodiment, if the targeting domain is 24 nucleotides in length and the core domain (counted from the 3′ end of the targeting domain) is 8 to 13 nucleotides in length, the secondary domain is 11 to 16 nucleotides in length.

[0644] In an embodiment, if the targeting domain is 23 nucleotides in length and the core domain (counted from the 3′ end of the targeting domain) is 8 to 13 nucleotides in length, the secondary domain is 10 to 15 nucleotides in length.

[0645] In an embodiment, if the targeting domain is 22 nucleotides in length and the core domain (counted from the 3′ end of the targeting domain) is 8 to 13 nucleotides in length, the secondary domain is 9 to 14 nucleotides in length.

[0646] In an embodiment, if the targeting domain is 21 nucleotides in length and the core domain (counted from the 3′ end of the targeting domain) is 8 to 13 nucleotides in length, the secondary domain is 8 to 13 nucleotides in length.

[0647] In an embodiment, if the targeting domain is 20 nucleotides in length and the core domain (counted from the 3′ end of the targeting domain) is 8 to 13 nucleotides in length, the secondary domain is 7 to 12 nucleotides in length.

[0648] In an embodiment, if the targeting domain is 19 nucleotides in length and the core domain (counted from the 3′ end of the targeting domain) is 8 to 13 nucleotides in length, the secondary domain is 6 to 11 nucleotides in length.

[0649] In an embodiment, if the targeting domain is 18 nucleotides in length and the core domain (counted from the 3′ end of the targeting domain) is 8 to 13 nucleotides in length, the secondary domain is 5 to 10 nucleotides in length.

[0650] In an embodiment, if the targeting domain is 17 nucleotides in length and the core domain (counted from the 3′ end of the targeting domain) is 8 to 13 nucleotides in length, the secondary domain is 4 to 9 nucleotides in length.

[0651] In an embodiment, if the targeting domain is 16 nucleotides in length and the core domain (counted from the 3′ end of the targeting domain) is 8 to 13 nucleotides in length, the secondary domain is 3 to 8 nucleotides in length.

[0652] In an embodiment, the secondary domain is 0, 1, 2, 3, 4, 5, 6, 7, 8, 9, 10, 11, 12, 13, 14 or 15 nucleotides in length.

[0653] The secondary domain is complementary with the secondary domain target. Typically the secondary domain has exact complementarity with the secondary domain target. In some embodiments the secondary domain can have 1, 2, 3, 4 or 5 nucleotides that are not complementary with the corresponding nucleotide of the secondary domain. In an embodiment, the degree of complementarity, together with other properties of the gRNA, is sufficient to allow targeting of a Cas9 molecule to the target nucleic acid.

[0654] In an embodiment, the core domain nucleotides do not comprise modifications, e.g., modifications of the type provided in Section VIII. However, in an embodiment, the core domain comprise one or more modifications, e.g., modifications that it render it less susceptible to degradation or more bio-compatible, e.g., less immunogenic. By way of example, the backbone of the core domain can be modified with a phosphorothioate, or other modification(s) from Section VIII. In an embodiment a nucleotide of the core domain can comprise a 2′ modification, e.g., a 2-acetylation, e.g., a 2′ methylation, or other modification(s) from Section VIII. Typically, a core domain will contain no more than 1, 2, or 3 modifications.

[0655] Modifications in the core domain can be selected to not interfere with targeting efficacy, which can be evaluated by testing a candidate modification in the system described in Section V. gRNA's having a candidate core domain having a selected length, sequence, degree of complementarity, or degree of modification, can be evaluated in the system described at Section V. The candidate core domain can be placed, either alone, or with one or more other candidate changes in a gRNA molecule/Cas9 molecule system known to be functional with a selected target and evaluated.

[0656] In an embodiment, the secondary domain nucleotides do not comprise modifications, e.g., modifications of the type provided in Section VIII. However, in an embodiment, the secondary domain comprises one or more modifications, e.g., modifications that it render it less susceptible to degradation or more bio-compatible, e.g., less immunogenic. By way of example, the backbone of the secondary domain can be modified with a phosphorothioate, or other modification(s) from Section VIII. In an embodiment a nucleotide of the secondary domain can comprise a 2′ modification, e.g., a 2-acetylation, e.g., a 2′ methylation, or other modification(s) from Section VIII. Typically, a secondary domain will contain no more than 1, 2, or 3 modifications.

[0657] Modifications in the secondary domain can be selected to not interfere with targeting efficacy, which can be evaluated by testing a candidate modification in the system described in Section V. gRNA's having a candidate secondary domain having a selected length, sequence, degree of complementarity, or degree of modification, can be evaluated in the system described at Section V. The candidate secondary domain can be placed, either alone, or with one or more other candidate changes in a gRNA molecule/Cas9 molecule system known to be functional with a selected target and evaluated.

[0658] In an embodiment, (1) the degree of complementarity between the core domain and its target, and (2) the degree of complementarity between the secondary domain and its target, may differ. In an embodiment, (1) may be greater (2). In an embodiment, (1) may be less than (2). In an embodiment, (1) and (2) are the same, e.g., each may be completely complementary with its target.

[0659] In an embodiment, (1) the number of modification (e.g., modifications from Section VIII) of the nucleotides of the core domain and (2) the number of modification (e.g., modifications from Section VIII) of the nucleotides of the secondary domain, may differ. In an embodiment, (1) may be less than (2). In an embodiment, (1) may be greater than (2). In an embodiment, (1) and (2) may be the same, e.g., each may be free of modifications.

### First and Second Complementarity Domains

[0660] The first complementarity domain is complementary with the second complementarity domain.

[0661] Typically the first domain does not have exact complementarity with the second complementarity domain target. In some embodiments, the first complementarity domain can have 1, 2, 3, 4 or 5 nucleotides that are not complementary with the corresponding nucleotide of the second complementarity domain. In an embodiment, 1, 2, 3, 4, 5 or 6, e.g., 3 nucleotides, will not pair in the duplex, and, e.g., form a non-duplexed or looped-out region. In an embodiment, an unpaired, or loop-out, region, e.g., a loop-out of 3 nucleotides, is present on the second complementarity domain. In an embodiment, the unpaired region begins 1, 2, 3, 4, 5, or 6, e.g., 4, nucleotides from the 5′ end of the second complementarity domain.

[0662] In an embodiment, the degree of complementarity, together with other properties of the gRNA, is sufficient to allow targeting of a Cas9 molecule to the target nucleic acid.

[0663] In an embodiment, the first and second complementarity domains are:
[0664] independently, 6+/−2, 7+/−2, 8+/−2, 9+/−2, 10+/−2, 11+/−2, 12+/−2, 13+/−2, 14+/−2, 15+/−2, 16+/−2, 17+/−2, 18+/−2, 19+/−2, or 20+/−2, 21+/−2, 22+/−2, 23+/−2, or 24+/−2 nucleotides in length;
[0665] independently, 6, 7, 8, 9, 10, 11, 12, 13, 14, 14, 16, 17, 18, 19, 20, 21, 22, 23, 24, 25, or 26, nucleotides in length; or
[0666] independently, 5 to 24, 5 to 23, 5 to 22, 5 to 21, 5 to 20, 7 to 18, 9 to 16, or 10 to 14 nucleotides in length.

[0667] In an embodiment, the second complementarity domain is longer than the first complementarity domain, e.g., 2, 3, 4, 5, or 6, e.g., 6, nucleotides longer.

[0668] In an embodiment, the first and second complementary domains, independently, do not comprise modifications, e.g., modifications of the type provided in Section VIII.

[0669] In an embodiment, the first and second complementary domains, independently, comprise one or more modifications, e.g., modifications that the render the domain less susceptible to degradation or more bio-compatible, e.g., less immunogenic. By way of example, the backbone of the domain can be modified with a phosphorothioate, or other modification(s) from Section VIII. In an embodiment a nucleotide of the domain can comprise a 2′ modification, e.g., a 2-acetylation, e.g., a 2′ methylation, or other modification(s) from Section VIII.

[0670] In an embodiment, the first and second complementary domains, independently, include 1, 2, 3, 4, 5, 6, 7 or 8 or more modifications. In an embodiment, the first and second complementary domains, independently, include 1, 2, 3, or 4 modifications within 5 nucleotides of its 5′ end. In an embodiment, the first and second complementary domains, independently, include as many as 1, 2, 3, or 4 modifications within 5 nucleotides of its 3′ end.

[0671] In an embodiment, the first and second complementary domains, independently, include modifications at two consecutive nucleotides, e.g., two consecutive nucleotides that are within 5 nucleotides of the 5′ end of the domain, within 5 nucleotides of the 3′ end of the domain, or more than 5 nucleotides away from one or both ends of the domain. In an embodiment, the first and second complementary domains, independently, include no two consecutive nucleotides that are modified, within 5 nucleotides of the 5′ end of the domain, within 5 nucleotides of the 3′ end of the domain, or within a region that is more than 5 nucleotides away from one or both ends of the domain. In an embodiment, the first and second complementary domains, independently, include no nucleotide that is modified within 5 nucleotides of the 5′ end of the domain, within 5 nucleotides of the 3′ end of the domain, or within a region that is more than 5 nucleotides away from one or both ends of the domain.

[0672] Modifications in a complementarity domain can be selected to not interfere with targeting efficacy, which can be evaluated by testing a candidate modification in the system described in Section V. gRNA's having a candidate complementarity domain having a selected length, sequence, degree of complementarity, or degree of modification, can be evaluated in the system described in Section V. The candidate complementarity domain can be placed, either alone, or with one or more other candidate changes in a gRNA molecule/Cas9 molecule system known to be functional with a selected target and evaluated.

[0673] In an embodiment, the first complementarity domain has at least 60, 70, 80, 85%, 90% or 95% homology with, or differs by no more than 1, 2, 3, 4, 5, or 6 nucleotides from, a reference first complementarity domain, e.g., a naturally occurring, e.g., an S. pyogenes, S. aureus, or S. thermophilus, first complementarity domain, or a first complementarity domain described herein, e.g., from FIGS. 1A-1G.

[0674] In an embodiment, the second complementarity domain has at least 60, 70, 80, 85%, 90%, or 95% homology with, or differs by no more than 1, 2, 3, 4, 5, or 6 nucleotides from, a reference second complementarity domain, e.g., a naturally occurring, e.g., an S. pyogenes, S. aureus, or S. thermophilus, second complementarity domain, or a second complementarity domain described herein, e.g., from FIG. 1A-1G.

[0675] The duplexed region formed by first and second complementarity domains is typically 6, 7, 8, 9, 10, 11, 12, 13, 14, 15, 16, 17, 18, 19, 20, 21 or 22 base pairs in length (excluding any looped out or unpaired nucleotides).

[0676] In some embodiments, the first and second complementarity domains, when duplexed, comprise 11 paired nucleotides, for example, in the gRNA sequence (one paired strand underlined, one bolded):

(SEQ ID NO: 5)
NNNNNNNNNNNNNNNNNNNNGUUUUAGAGCUAGAAAUAGCAAGUUAAAA
UAAGGCUAGUCCGUUAUCAACUUGAAAAAGUGGCACCGAGUCGGUGC.

[0677] In some embodiments, the first and second complementarity domains, when duplexed, comprise 15 paired nucleotides, for example in the gRNA sequence (one paired strand underlined, one bolded):

(SEQ ID NO: 27)
NNNNNNNNNNNNNNNNNNNNGUUUUAGAGCUAUGCUGAAAAGCAUAGCA
AGUUAAAAUAAGGCUAGUCCGUUAUCAACUUGAAAAAGUGGCACCGAGU
CGGUGC.

[0678] In some embodiments the first and second complementarity domains, when duplexed, comprise 16 paired nucleotides, for example in the gRNA sequence (one paired strand underlined, one bolded):

(SEQ ID NO: 28)
NNNNNNNNNNNNNNNNNNNNGUUUUAGAGCUAUGCUGGAAACAGCAUAG
CAAGUUAAAAUAAGGCUAGUCCGUUAUCAACUUGAAAAAGUGGCACCGA
GUCGGUGC.

[0679] In some embodiments the first and second complementarity domains, when duplexed, comprise 21 paired nucleotides, for example in the gRNA sequence (one paired strand underlined, one bolded):

(SEQ ID NO: 29)
NNNNNNNNNNNNNNNNNNNNGUUUUAGAGCUAUGCUGUUUUGGAAACAAA
ACAGCAUAGCAAGUUAAAAUAAGGCUAGUCCGUUAUCAACUUGAAAAAGU
GGCACCGAGUCGGUGC.

[0680] In some embodiments, nucleotides are exchanged to remove poly-U tracts, for example in the gRNA sequences (exchanged nucleotides underlined):

(SEQ ID NO: 30)
NNNNNNNNNNNNNNNNNNNNGUAUUAGAGCUAGAAAUAGCAAGUUAAUAU
AAGGCUAGUCCGUUAUCAACUUGAAAAAGUGGCACCGAGUCGGUGC;
(SEQ ID NO: 31)
NNNNNNNNNNNNNNNNNNNNGUUUAAGAGCUAGAAAUAGCAAGUUUAAAU
AAGGCUAGUCCGUUAUCAACUUGAAAAAGUGGCACCGAGUCGGUGC;
and
(SEQ ID NO: 32)
NNNNNNNNNNNNNNNNNNNNGUAUUAGAGCUAUGCUGUAUUGGAAACAAU
ACAGCAUAGCAAGUUAAUAUAAGGCUAGUCCGUUAUCAACUUGAAAAAGU
GGCACCGAGUCGGUGC.

### 5′ Extension Domain

[0681] In an embodiment, a modular gRNA can comprise additional sequence, 5′ to the second complementarity domain. In an embodiment, the 5′ extension domain is 2 to 10, 2 to 9, 2 to 8, 2 to 7, 2 to 6, 2 to 5, or 2 to 4 nucleotides in length. In an embodiment, the 5′ extension domain is 2, 3, 4, 5, 6, 7, 8, 9, or 10 or more nucleotides in length.

[0682] In an embodiment, the 5′ extension domain nucleotides do not comprise modifications, e.g., modifications of the type provided in Section VIII. However, in an embodiment, the 5′ extension domain comprises one or more modifications, e.g., modifications that it render it less susceptible to degradation or more bio-compatible, e.g., less immunogenic. By way of example, the backbone of the 5′ extension domain can be modified with a phosphorothioate, or other modification(s) from Section VIII. In an embodiment, a nucleotide of the 5′ extension domain can comprise a 2′ modification, e.g., a 2-acetylation, e.g., a 2′ methylation, or other modification(s) from Section VIII.

[0683] In some embodiments, the 5′ extension domain can comprise as many as 1, 2, 3, 4, 5, 6, 7 or 8 modifications. In an embodiment, the 5′ extension domain comprises as many as 1, 2, 3, or 4 modifications within 5 nucleotides of its 5′ end, e.g., in a modular gRNA molecule. In an embodiment, the 5′ extension domain comprises as many as 1, 2, 3, or 4 modifications within 5 nucleotides of its 3′ end, e.g., in a modular gRNA molecule.

[0684] In some embodiments, the 5′ extension domain comprises modifications at two consecutive nucleotides, e.g., two consecutive nucleotides that are within 5 nucleotides of the 5′ end of the 5′ extension domain, within 5 nucleotides of the 3′ end of the 5′ extension domain, or more than 5 nucleotides away from one or both ends of the 5′ extension domain. In an embodiment, no two consecutive nucleotides are modified within 5 nucleotides of the 5′ end of the 5′ extension domain, within 5 nucleotides of the 3′ end of the 5′ extension domain, or within a region that is more than 5 nucleotides away from one or both ends of the 5′ extension domain. In an embodiment, no nucleotide is modified within 5 nucleotides of the 5′ end of the 5′ extension domain, within 5 nucleotides of the 3′ end of the 5′ extension domain, or within a region that is more than 5 nucleotides away from one or both ends of the 5′ extension domain.

[0685] Modifications in the 5′ extension domain can be selected to not interfere with gRNA molecule efficacy, which can be evaluated by testing a candidate modification in the system described in Section V. gRNA's having a candidate 5′ extension domain having a selected length, sequence, degree of complementarity, or degree of modification, can be evaluated in the system described at Section V. The candidate 5′ extension domain can be placed, either alone, or with one or more other candidate changes in a gRNA molecule/Cas9 molecule system known to be functional with a selected target and evaluated.

[0686] In an embodiment, the 5′ extension domain has at least 60, 70, 80, 85, 90 or 95% homology with, or differs by no more than 1, 2, 3, 4, 5, or 6 nucleotides from, a reference 5′ extension domain, e.g., a naturally occurring, e.g., an S. pyogenes, S. aureus, or S. thermophilus, 5′ extension domain, or a 5′ extension domain described herein, e.g., from FIGS. 1A-1G.

### Linking Domain

[0687] In a unimolecular gRNA molecule the linking domain is disposed between the first and second complementarity domains. In a modular gRNA molecule, the two molecules are associated with one another by the complementarity domains.

[0688] In an embodiment, the linking domain is 10+/−5, 20+/−5, 30+/−5, 40+/−5, 50+/−5, 60+/−5, 70+/−5, 80+/−5, 90+/−5, or 100+/−5 nucleotides, in length.

[0689] In an embodiment, the linking domain is 20+/−10, 30+/−10, 40+/−10, 50+/−10, 60+/−10, 70+/−10, 80+/−10, 90+/−10, or 100+/−10 nucleotides, in length.

[0690] In an embodiment, the linking domain is 10 to 100, 10 to 90, 10 to 80, 10 to 70, 10 to 60, 10 to 50, 10 to 40, 10 to 30, 10 to 20 or 10 to 15 nucleotides in length. In other embodiments, the linking domain is 20 to 100, 20 to 90, 20 to 80, 20 to 70, 20 to 60, 20 to 50, 20 to 40, 20 to 30, or 20 to 25 nucleotides in length.

[0691] In an embodiment, the linking domain is 1, 2, 3, 4, 5, 6, 7, 8, 9, 10, 11, 12, 13, 14, 15, 16 17, 18, 19, or 20 nucleotides in length.

[0692] In an embodiment, the linking domain is a covalent bond.

[0693] In an embodiment, the linking domain comprises a duplexed region, typically adjacent to or within 1, 2, or 3 nucleotides of the 3′ end of the first complementarity domain and/or the 5-end of the second complementarity domain. In an embodiment, the duplexed region can be 20+/−10 base pairs in length. In an embodiment, the duplexed region can be 10+/−5, 15+/−5, 20+/−5, or 30+/−5 base pairs in length. In an embodiment, the duplexed region can be 1, 2, 3, 4, 5, 6, 7, 8, 9, 10, 11, 12, 13, 14, or 15 base pairs in length.

[0694] Typically the sequences forming the duplexed region have exact complementarity with one another, though in some embodiments as many as 1, 2, 3, 4, 5, 6, 7 or 8 nucleotides are not complementary with the corresponding nucleotides.

[0695] In an embodiment, the linking domain nucleotides do not comprise modifications, e.g., modifications of the type provided in Section VIII. However, in an embodiment, the linking domain comprises one or more modifications, e.g., modifications that it render it less susceptible to degradation or more bio-compatible, e.g., less immunogenic. By way of example, the backbone of the linking domain can be modified with a phosphorothioate, or other modification(s) from Section VIII. In an embodiment a nucleotide of the linking domain can comprise a 2′ modification, e.g., a 2-acetylation, e.g., a 2′ methylation, or other modification(s) from Section VIII. In some embodiments, the linking domain can comprise as many as 1, 2, 3, 4, 5, 6, 7 or 8 modifications.

[0696] Modifications in a linking domain can be selected to not interfere with targeting efficacy, which can be evaluated by testing a candidate modification in the system described in Section V. gRNA's having a candidate linking domain having a selected length, sequence, degree of complementarity, or degree of modification, can be evaluated a system described in Section V. A candidate linking domain can be placed, either alone, or with one or more other candidate changes in a gRNA molecule/Cas9 molecule system known to be functional with a selected target and evaluated.

[0697] In an embodiment, the linking domain has at least 60, 70, 80, 85, 90 or 95% homology with, or differs by no more than 1, 2, 3, 4, 5, or 6 nucleotides from, a reference linking domain, e.g., a linking domain described herein, e.g., from FIGS. 1A-1G.

### Proximal Domain

[0698] In an embodiment, the proximal domain is 6+/−2, 7+/−2, 8+/−2, 9+/−2, 10+/−2, 11+/−2, 12+/−2, 13+/−2, 14+/−2, 14+/−2, 16+/−2, 17+/−2, 18+/−2, 19+/−2, or 20+/−2 nucleotides in length.

[0699] In an embodiment, the proximal domain is 6, 7, 8, 9, 10, 11, 12, 13, 14, 14, 16, 17, 18, 19, or 20 nucleotides in length.

[0700] In an embodiment, the proximal domain is 5 to 20, 7, to 18, 9 to 16, or 10 to 14 nucleotides in length.

[0701] In an embodiment, the proximal domain nucleotides do not comprise modifications, e.g., modifications of the type provided in Section VIII. However, in an embodiment, the proximal domain comprises one or more modifications, e.g., modifications that it render it less susceptible to degradation or more bio-compatible, e.g., less immunogenic. By way of example, the backbone of the proximal domain can be modified with a phosphorothioate, or other modification(s) from Section VIII. In an embodiment a nucleotide of the proximal domain can comprise a 2′ modification, e.g., a 2-acetylation, e.g., a 2′ methylation, or other modification(s) from Section VIII.

[0702] In some embodiments, the proximal domain can comprise as many as 1, 2, 3, 4, 5, 6, 7 or 8 modifications. In an embodiment, the proximal domain comprises as many as 1, 2, 3, or 4 modifications within 5 nucleotides of its 5′ end, e.g., in a modular gRNA molecule. In an embodiment, the target domain comprises as many as 1, 2, 3, or 4 modifications within 5 nucleotides of its 3′ end, e.g., in a modular gRNA molecule.

[0703] In some embodiments, the proximal domain comprises modifications at two consecutive nucleotides, e.g., two consecutive nucleotides that are within 5 nucleotides of the 5′ end of the proximal domain, within 5 nucleotides of the 3′ end of the proximal domain, or more than 5 nucleotides away from one or both ends of the proximal domain. In an embodiment, no two consecutive nucleotides are modified within 5 nucleotides of the 5′ end of the proximal domain, within 5 nucleotides of the 3′ end of the proximal domain, or within a region that is more than 5 nucleotides away from one or both ends of the proximal domain. In an embodiment, no nucleotide is modified within 5 nucleotides of the 5′ end of the proximal domain, within 5 nucleotides of the 3′ end of the proximal domain, or within a region that is more than 5 nucleotides away from one or both ends of the proximal domain.

[0704] Modifications in the proximal domain can be selected to not interfere with gRNA molecule efficacy, which can be evaluated by testing a candidate modification in the system described in Section V. gRNA's having a candidate proximal domain having a selected length, sequence, degree of complementarity, or degree of modification, can be evaluated in the system described at Section V. The candidate proximal domain can be placed, either alone, or with one or more other candidate changes in a gRNA molecule/Cas9 molecule system known to be functional with a selected target and evaluated.

[0705] In an embodiment, the proximal domain has at least 60, 70, 80, 85 90 or 95% homology with, or differs by no more than 1, 2, 3, 4, 5, or 6 nucleotides from, a reference proximal domain, e.g., a naturally occurring, e.g., an S. pyogenes, S. aureus, or S. thermophilus, proximal domain, or a proximal domain described herein, e.g., from FIGS. 1A-1G.

### Tail Domain

[0706] In an embodiment, the tail domain is 10+/−5, 20+/−5, 30+/−5, 40+/−5, 50+/−5, 60+/−5, 70+/−5, 80+/−5, 90+/−5, or 100+/−5 nucleotides, in length.

[0707] In an embodiment, the tail domain is 20+/−5 nucleotides in length.

[0708] In an embodiment, the tail domain is 20+/−10, 30+/−10, 40+/−10, 50+/−10, 60+/−10, 70+/−10, 80+/−10, 90+/−10, or 100+/−10 nucleotides, in length.

[0709] In an embodiment, the tail domain is 25+/−10 nucleotides in length.

[0710] In an embodiment, the tail domain is 10 to 100, 10 to 90, 10 to 80, 10 to 70, 10 to 60, 10 to 50, 10 to 40, 10 to 30, 10 to 20 or 10 to 15 nucleotides in length.

[0711] In other embodiments, the tail domain is 20 to 100, 20 to 90, 20 to 80, 20 to 70, 20 to 60, 20 to 50, 20 to 40, 20 to 30, or 20 to 25 nucleotides in length.

[0712] In an embodiment, the tail domain is 1 to 20, 1 to 1, 1 to 10, or 1 to 5 nucleotides in length.

[0713] In an embodiment, the tail domain nucleotides do not comprise modifications, e.g., modifications of the type provided in Section VIII. However, in an embodiment, the tail domain comprises one or more modifications, e.g., modifications that it render it less susceptible to degradation or more bio-compatible, e.g., less immunogenic. By way of example, the backbone of the tail domain can be modified with a phosphorothioate, or other modification(s) from Section VIII. In an embodiment a nucleotide of the tail domain can comprise a 2′ modification, e.g., a 2-acetylation, e.g., a 2′ methylation, or other modification(s) from Section VIII.

[0714] In some embodiments, the tail domain can have as many as 1, 2, 3, 4, 5, 6, 7 or 8 modifications. In an embodiment, the target domain comprises as many as 1, 2, 3, or 4 modifications within 5 nucleotides of its 5′ end. In an embodiment, the target domain comprises as many as 1, 2, 3, or 4 modifications within 5 nucleotides of its 3′ end.

[0715] In an embodiment, the tail domain comprises a tail duplex domain, which can form a tail duplexed region. In an embodiment, the tail duplexed region can be 3, 4, 5, 6, 7, 8, 9, 10, 11, or 12 base pairs in length. In an embodiment, a further single stranded domain, exists 3′ to the tail duplexed domain. In an embodiment, this domain is 3, 4, 5, 6, 7, 8, 9, or 10 nucleotides in length. In an embodiment it is 4 to 6 nucleotides in length.

[0716] In an embodiment, the tail domain has at least 60, 70, 80, or 90% homology with, or differs by no more than 1, 2, 3, 4, 5, or 6 nucleotides from, a reference tail domain, e.g., a naturally occurring, e.g., an S. pyogenes, or S. thermophilus, tail domain, or a tail domain described herein, e.g., from FIGS. 1A-1G.

[0717] In an embodiment, the proximal and tail domain, taken together comprise the following sequences:

(SEQ ID NO: 33)
AAGGCUAGUCCGUUAUCAACUUGAAAAAGUGGCACCGAGUCGGUGCU,
(SEQ ID NO: 34)
AAGGCUAGUCCGUUAUCAACUUGAAAAAGUGGCACCGAGUCGGUGGUGC,
(SEQ ID NO: 35)
AAGGCUAGUCCGUUAUCAACUUGAAAAAGUGGCACCGAGUCGGUGCGGA
UC,
(SEQ ID NO: 36)
AAGGCUAGUCCGUUAUCAACUUGAAAAAGUG,
(SEQ ID NO: 37)
AAGGCUAGUCCGUUAUCA,
or
(SEQ ID NO: 38)
AAGGCUAGUCCG.

[0718] In an embodiment, the tail domain comprises the 3′ sequence UUUUUU, e.g., if a U6 promoter is used for transcription.

[0719] In an embodiment, the tail domain comprises the 3′ sequence UUUU, e.g., if an H1 promoter is used for transcription.

[0720] In an embodiment, tail domain comprises variable numbers of 3′ Us depending, e.g., on the termination signal of the pol-Ill promoter used.

[0721] In an embodiment, the tail domain comprises variable 3′ sequence derived from the DNA template if a T7 promoter is used.

[0722] In an embodiment, the tail domain comprises variable 3′ sequence derived from the DNA template, e.g., if in vitro transcription is used to generate the RNA molecule.

[0723] In an embodiment, the tail domain comprises variable 3′ sequence derived from the DNA template, e., if a pol-II promoter is used to drive transcription.

[0724] Modifications in the tail domain can be selected to not interfere with targeting efficacy, which can be evaluated by testing a candidate modification in the system described in Section V. gRNAs having a candidate tail domain having a selected length, sequence, degree of complementarity, or degree of modification, can be evaluated in the system described in Section V. The candidate tail domain can be placed, either alone, or with one or more other candidate changes in a gRNA molecule/Cas9 molecule system known to be functional with a selected target and evaluated.

[0725] In some embodiments, the tail domain comprises modifications at two consecutive nucleotides, e.g., two consecutive nucleotides that are within 5 nucleotides of the 5′ end of the tail domain, within 5 nucleotides of the 3′ end of the tail domain, or more than 5 nucleotides away from one or both ends of the tail domain. In an embodiment, no two consecutive nucleotides are modified within 5 nucleotides of the 5′ end of the tail domain, within 5 nucleotides of the 3′ end of the tail domain, or within a region that is more than 5 nucleotides away from one or both ends of the tail domain. In an embodiment, no nucleotide is modified within 5 nucleotides of the 5′ end of the tail domain, within 5 nucleotides of the 3′ end of the tail domain, or within a region that is more than 5 nucleotides away from one or both ends of the tail domain.

[0726] In an embodiment a gRNA has the following structure:
[0727] 5′ [targeting domain]-[first complementarity domain]-[linking domain]-[second complementarity domain]-[proximal domain]-[tail domain]-3′
[0728] wherein, the targeting domain comprises a core domain and optionally a secondary domain, and is 10 to 50 nucleotides in length;
[0729] the first complementarity domain is 5 to 25 nucleotides in length and, In an embodiment has at least 50, 60, 70, 80, 85, 90 or 95% homology with a reference first complementarity domain disclosed herein;
[0730] the linking domain is 1 to 5 nucleotides in length;
[0731] the proximal domain is 5 to 20 nucleotides in length and, in an embodiment has at least 50, 60, 70, 80, 85, 90 or 95% homology with a reference proximal domain disclosed herein; and
[0732] the tail domain is absent or a nucleotide sequence is 1 to 50 nucleotides in length and, in an embodiment has at least 50, 60, 70, 80, 85, 90 or 95% homology with a reference tail domain disclosed herein.
   Exemplary Chimeric gRNAs

[0733] In an embodiment, a unimolecular, or chimeric, gRNA comprises, preferably from 5′ to 3′:
[0734] a targeting domain, e.g., comprising 15, 16, 17, 18, 19, 20, 21, 22, 23, 24, 25, or 26 nucleotides (which is complementary to a target nucleic acid);
[0735] a first complementarity domain;
[0736] a linking domain;
[0737] a second complementarity domain (which is complementary to the first complementarity domain);
[0738] a proximal domain; and
[0739] a tail domain,
[0740] wherein,
[0741] (a) the proximal and tail domain, when taken together, comprise at least 15, 18, 20, 25, 30, 31, 35, 40, 45, 49, 50, or 53 nucleotides;
[0742] (b) there are at least 15, 18, 20, 25, 30, 31, 35, 40, 45, 49, 50, or 53 nucleotides 3′ to the last nucleotide of the second complementarity domain; or
[0743] (c) there are at least 16, 19, 21, 26, 31, 32, 36, 41, 46, 50, 51, or 54 nucleotides 3′ to the last nucleotide of the second complementarity domain that is complementary to its corresponding nucleotide of the first complementarity domain.

[0744] In an embodiment, the sequence from (a), (b), or (c), has at least 60, 75, 80, 85, 90, 95, or 99% homology with the corresponding sequence of a naturally occurring gRNA, or with a gRNA described herein.

[0745] In an embodiment, the proximal and tail domain, when taken together, comprise at least 15, 18, 20, 25, 30, 31, 35, 40, 45, 49, 50, or 53 nucleotides.

[0746] In an embodiment, there are at least 15, 18, 20, 25, 30, 31, 35, 40, 45, 49, 50, or 53 nucleotides 3′ to the last nucleotide of the second complementarity domain.

[0747] In an embodiment, there are at least 16, 19, 21, 26, 31, 32, 36, 41, 46, 50, 51, or 54 nucleotides 3′ to the last nucleotide of the second complementarity domain that is complementary to its corresponding nucleotide of the first complementarity domain.

[0748] In an embodiment, the targeting domain comprises, has, or consists of, 16, 17, 18, 19, 20, 21, 22, 23, 24, 25 or 26 nucleotides (e.g., 16, 17, 18, 19, 20, 21, 22, 23, 24, 25 or 26 consecutive nucleotides) having complementarity with the target domain, e.g., the targeting domain is 16, 17, 18, 19, 20, 21, 22, 23, 24, 25 or 26 nucleotides in length.

[0749] In an embodiment, the targeting domain comprises, has, or consists of, 16 nucleotides (e.g., 16 consecutive nucleotides) having complementarity with the target domain, e.g., the targeting domain is 16 nucleotides in length.

[0750] In an embodiment, the targeting domain comprises, has, or consists of, 17 nucleotides (e.g., 17 consecutive nucleotides) having complementarity with the target domain, e.g., the targeting domain is 17 nucleotides in length.

[0751] In an embodiment, the targeting domain comprises, has, or consists of, 18 nucleotides (e.g., 18 consecutive nucleotides) having complementarity with the target domain, e.g., the targeting domain is 18 nucleotides in length.

[0752] In an embodiment, the targeting domain comprises, has, or consists of, 19 nucleotides (e.g., 19 consecutive nucleotides) having complementarity with the target domain, e.g., the targeting domain is 19 nucleotides in length.

[0753] In an embodiment, the targeting domain comprises, has, or consists of, 20 nucleotides (e.g., 20 consecutive nucleotides) having complementarity with the target domain, e.g., the targeting domain is 20 nucleotides in length.

[0754] In an embodiment, the targeting domain comprises, has, or consists of, 21 nucleotides (e.g., 21 consecutive nucleotides) having complementarity with the target domain, e.g., the targeting domain is 21 nucleotides in length.

[0755] In an embodiment, the targeting domain comprises, has, or consists of, 22 nucleotides (e.g., 22 consecutive nucleotides) having complementarity with the target domain, e.g., the targeting domain is 22 nucleotides in length.

[0756] In an embodiment, the targeting domain comprises, has, or consists of, 23 nucleotides (e.g., 23 consecutive nucleotides) having complementarity with the target domain, e.g., the targeting domain is 23 nucleotides in length.

[0757] In an embodiment, the targeting domain comprises, has, or consists of, 24 nucleotides (e.g., 24 consecutive nucleotides) having complementarity with the target domain, e.g., the targeting domain is 24 nucleotides in length.

[0758] In an embodiment, the targeting domain comprises, has, or consists of, 25 nucleotides (e.g., 25 consecutive nucleotides) having complementarity with the target domain, e.g., the targeting domain is 25 nucleotides in length.

[0759] In an embodiment, the targeting domain comprises, has, or consists of, 26 nucleotides (e.g., 26 consecutive nucleotides) having complementarity with the target domain, e.g., the targeting domain is 26 nucleotides in length.

[0760] In an embodiment, the targeting domain comprises, has, or consists of, 16 nucleotides (e.g., 16 consecutive nucleotides) having complementarity with the target domain, e.g., the targeting domain is 16 nucleotides in length; and the proximal and tail domain, when taken together, comprise at least 15, 18, 20, 25, 30, 31, 35, 40, 45, 49, 50, or 53 nucleotides.

[0761] In an embodiment, the targeting domain comprises, has, or consists of, 16 nucleotides (e.g., 16 consecutive nucleotides) having complementarity with the target domain, e.g., the targeting domain is 16 nucleotides in length; and there are at least 15, 18, 20, 25, 30, 31, 35, 40, 45, 49, 50, or 53 nucleotides 3′ to the last nucleotide of the second complementarity domain.

[0762] In an embodiment, the targeting domain comprises, has, or consists of, 16 nucleotides (e.g., 16 consecutive nucleotides) having complementarity with the target domain, e.g., the targeting domain is 16 nucleotides in length; and there are at least 16, 19, 21, 26, 31, 32, 36, 41, 46, 50, 51, or 54 nucleotides 3′ to the last nucleotide of the second complementarity domain that is complementary to its corresponding nucleotide of the first complementarity domain.

[0763] In an embodiment, the targeting domain comprises, has, or consists of, 17 nucleotides (e.g., 17 consecutive nucleotides) having complementarity with the target domain, e.g., the targeting domain is 17 nucleotides in length; and the proximal and tail domain, when taken together, comprise at least 15, 18, 20, 25, 30, 31, 35, 40, 45, 49, 50, or 53 nucleotides.

[0764] In an embodiment, the targeting domain comprises, has, or consists of, 17 nucleotides (e.g., 17 consecutive nucleotides) having complementarity with the target domain, e.g., the targeting domain is 17 nucleotides in length; and there are at least 15, 18, 20, 25, 30, 31, 35, 40, 45, 49, 50, or 53 nucleotides 3′ to the last nucleotide of the second complementarity domain.

[0765] In an embodiment, the targeting domain comprises, has, or consists of, 17 nucleotides (e.g., 17 consecutive nucleotides) having complementarity with the target domain, e.g., the targeting domain is 17 nucleotides in length; and there are at least 16, 19, 21, 26, 31, 32, 36, 41, 46, 50, 51, or 54 nucleotides 3′ to the last nucleotide of the second complementarity domain that is complementary to its corresponding nucleotide of the first complementarity domain.

[0766] In an embodiment, the targeting domain comprises, has, or consists of, 18 nucleotides (e.g., 18 consecutive nucleotides) having complementarity with the target domain, e.g., the targeting domain is 18 nucleotides in length; and the proximal and tail domain, when taken together, comprise at least 15, 18, 20, 25, 30, 31, 35, 40, 45, 49, 50, or 53 nucleotides.

[0767] In an embodiment, the targeting domain comprises, has, or consists of, 18 nucleotides (e.g., 18 consecutive nucleotides) having complementarity with the target domain, e.g., the targeting domain is 18 nucleotides in length; and there are at least 15, 18, 20, 25, 30, 31, 35, 40, 45, 49, 50, or 53 nucleotides 3′ to the last nucleotide of the second complementarity domain.

[0768] In an embodiment, the targeting domain comprises, has, or consists of, 18 nucleotides (e.g., 18 consecutive nucleotides) having complementarity with the target domain, e.g., the targeting domain is 18 nucleotides in length; and there are at least 16, 19, 21, 26, 31, 32, 36, 41, 46, 50, 51, or 54 nucleotides 3′ to the last nucleotide of the second complementarity domain that is complementary to its corresponding nucleotide of the first complementarity domain.

[0769] In an embodiment, the targeting domain comprises, has, or consists of, 19 nucleotides (e.g., 19 consecutive nucleotides) having complementarity with the target domain, e.g., the targeting domain is 19 nucleotides in length; and the proximal and tail domain, when taken together, comprise at least 15, 18, 20, 25, 30, 31, 35, 40, 45, 49, 50, or 53 nucleotides.

[0770] In an embodiment, the targeting domain comprises, has, or consists of, 19 nucleotides (e.g., 19 consecutive nucleotides) having complementarity with the target domain, e.g., the targeting domain is 19 nucleotides in length; and there are at least 15, 18, 20, 25, 30, 31, 35, 40, 45, 49, 50, or 53 nucleotides 3′ to the last nucleotide of the second complementarity domain.

[0771] In an embodiment, the targeting domain comprises, has, or consists of, 19 nucleotides (e.g., 19 consecutive nucleotides) having complementarity with the target domain, e.g., the targeting domain is 19 nucleotides in length; and there are at least 16, 19, 21, 26, 31, 32, 36, 41, 46, 50, 51, or 54 nucleotides 3′ to the last nucleotide of the second complementarity domain that is complementary to its corresponding nucleotide of the first complementarity domain.

[0772] In an embodiment, the targeting domain comprises, has, or consists of, 20 nucleotides (e.g., 20 consecutive nucleotides) having complementarity with the target domain, e.g., the targeting domain is 20 nucleotides in length; and the proximal and tail 118945.8002.US13 183833462.1-117-domain, when taken together, comprise at least 15, 18, 20, 25, 30, 31, 35, 40, 45, 49, 50, or 53 nucleotides.

[0773] In an embodiment, the targeting domain comprises, has, or consists of, 20 nucleotides (e.g., 20 consecutive nucleotides) having complementarity with the target domain, e.g., the targeting domain is 20 nucleotides in length; and there are at least 15, 18, 20, 25, 30, 31, 35, 40, 45, 49, 50, or 53 nucleotides 3′ to the last nucleotide of the second complementarity domain.

[0774] In an embodiment, the targeting domain comprises, has, or consists of, 20 nucleotides (e.g., 20 consecutive nucleotides) having complementarity with the target domain, e.g., the targeting domain is 20 nucleotides in length; and there are at least 16, 19, 21, 26, 31, 32, 36, 41, 46, 50, 51, or 54 nucleotides 3′ to the last nucleotide of the second complementarity domain that is complementary to its corresponding nucleotide of the first complementarity domain.

[0775] In an embodiment, the targeting domain comprises, has, or consists of, 21 nucleotides (e.g., 21 consecutive nucleotides) having complementarity with the target domain, e.g., the targeting domain is 21 nucleotides in length; and the proximal and tail domain, when taken together, comprise at least 15, 18, 20, 25, 30, 31, 35, 40, 45, 49, 50, or 53 nucleotides.

[0776] In an embodiment, the targeting domain comprises, has, or consists of, 21 nucleotides (e.g., 21 consecutive nucleotides) having complementarity with the target domain, e.g., the targeting domain is 21 nucleotides in length; and there are at least 15, 18, 20, 25, 30, 31, 35, 40, 45, 49, 50, or 53 nucleotides 3′ to the last nucleotide of the second complementarity domain.

[0777] In an embodiment, the targeting domain comprises, has, or consists of, 21 nucleotides (e.g., 21 consecutive nucleotides) having complementarity with the target domain, e.g., the targeting domain is 21 nucleotides in length; and there are at least 16, 19, 21, 26, 31, 32, 36, 41, 46, 50, 51, or 54 nucleotides 3′ to the last nucleotide of the second complementarity domain that is complementary to its corresponding nucleotide of the first complementarity domain.

[0778] In an embodiment, the targeting domain comprises, has, or consists of, 22 nucleotides (e.g., 22 consecutive nucleotides) having complementarity with the target domain, e.g., the targeting domain is 22 nucleotides in length; and the proximal and tail domain, when taken together, comprise at least 15, 18, 20, 25, 30, 31, 35, 40, 45, 49, 50, or 53 nucleotides.

[0779] In an embodiment, the targeting domain comprises, has, or consists of, 22 nucleotides (e.g., 22 consecutive nucleotides) having complementarity with the target domain, e.g., the targeting domain is 22 nucleotides in length; and there are at least 15, 18, 20, 25, 30, 31, 35, 40, 45, 49, 50, or 53 nucleotides 3′ to the last nucleotide of the second complementarity domain.

[0780] In an embodiment, the targeting domain comprises, has, or consists of, 22 nucleotides (e.g., 22 consecutive nucleotides) having complementarity with the target domain, e.g., the targeting domain is 22 nucleotides in length; and there are at least 16, 19, 21, 26, 31, 32, 36, 41, 46, 50, 51, or 54 nucleotides 3′ to the last nucleotide of the second complementarity domain that is complementary to its corresponding nucleotide of the first complementarity domain.

[0781] In an embodiment, the targeting domain comprises, has, or consists of, 23 nucleotides (e.g., 23 consecutive nucleotides) having complementarity with the target domain, e.g., the targeting domain is 23 nucleotides in length; and the proximal and tail domain, when taken together, comprise at least 15, 18, 20, 25, 30, 31, 35, 40, 45, 49, 50, or 53 nucleotides.

[0782] In an embodiment, the targeting domain comprises, has, or consists of, 23 nucleotides (e.g., 23 consecutive nucleotides) having complementarity with the target domain, e.g., the targeting domain is 23 nucleotides in length; and there are at least 15, 18, 20, 25, 30, 31, 35, 40, 45, 49, 50, or 53 nucleotides 3′ to the last nucleotide of the second complementarity domain.

[0783] In an embodiment, the targeting domain comprises, has, or consists of, 23 nucleotides (e.g., 23 consecutive nucleotides) having complementarity with the target domain, e.g., the targeting domain is 23 nucleotides in length; and there are at least 16, 19, 21, 26, 31, 32, 36, 41, 46, 50, 51, or 54 nucleotides 3′ to the last nucleotide of the second complementarity domain that is complementary to its corresponding nucleotide of the first complementarity domain.

[0784] In an embodiment, the targeting domain comprises, has, or consists of, 24 nucleotides (e.g., 24 consecutive nucleotides) having complementarity with the target domain, e.g., the targeting domain is 24 nucleotides in length; and the proximal and tail domain, when taken together, comprise at least 15, 18, 20, 25, 30, 31, 35, 40, 45, 49, 50, or 53 nucleotides.

[0785] In an embodiment, the targeting domain comprises, has, or consists of, 24 nucleotides (e.g., 24 consecutive nucleotides) having complementarity with the target domain, e.g., the targeting domain is 24 nucleotides in length; and there are at least 15, 18, 20, 25, 30, 31, 35, 40, 45, 49, 50, or 53 nucleotides 3′ to the last nucleotide of the second complementarity domain.

[0786] In an embodiment, the targeting domain comprises, has, or consists of, 24 nucleotides (e.g., 24 consecutive nucleotides) having complementarity with the target domain, e.g., the targeting domain is 24 nucleotides in length; and there are at least 16, 19, 21, 26, 31, 32, 36, 41, 46, 50, 51, or 54 nucleotides 3′ to the last nucleotide of the second complementarity domain that is complementary to its corresponding nucleotide of the first complementarity domain.

[0787] In an embodiment, the targeting domain comprises, has, or consists of, 25 nucleotides (e.g., 25 consecutive nucleotides) having complementarity with the target domain, e.g., the targeting domain is 25 nucleotides in length; and the proximal and tail domain, when taken together, comprise at least 15, 18, 20, 25, 30, 31, 35, 40, 45, 49, 50, or 53 nucleotides.

[0788] In an embodiment, the targeting domain comprises, has, or consists of, 25 nucleotides (e.g., 25 consecutive nucleotides) having complementarity with the target domain, e.g., the targeting domain is 25 nucleotides in length; and there are at least 15, 18, 20, 25, 30, 31, 35, 40, 45, 49, 50, or 53 nucleotides 3′ to the last nucleotide of the second complementarity domain.

[0789] In an embodiment, the targeting domain comprises, has, or consists of, 25 nucleotides (e.g., 25 consecutive nucleotides) having complementarity with the target domain, e.g., the targeting domain is 25 nucleotides in length; and there are at least 16, 19, 21, 26, 31, 32, 36, 41, 46, 50, 51, or 54 nucleotides 3′ to the last nucleotide of the second complementarity domain that is complementary to its corresponding nucleotide of the first complementarity domain.

[0790] In an embodiment, the targeting domain comprises, has, or consists of, 26 nucleotides (e.g., 26 consecutive nucleotides) having complementarity with the target domain, e.g., the targeting domain is 26 nucleotides in length; and the proximal and tail domain, when taken together, comprise at least 15, 18, 20, 25, 30, 31, 35, 40, 45, 49, 50, or 53 nucleotides.

[0791] In an embodiment, the targeting domain comprises, has, or consists of, 26 nucleotides (e.g., 26 consecutive nucleotides) having complementarity with the target domain, e.g., the targeting domain is 26 nucleotides in length; and there are at least 15, 18, 20, 25, 30, 31, 35, 40, 45, 49, 50, or 53 nucleotides 3′ to the last nucleotide of the second complementarity domain.

[0792] In an embodiment, the targeting domain comprises, has, or consists of, 26 nucleotides (e.g., 26 consecutive nucleotides) having complementarity with the target domain, e.g., the targeting domain is 26 nucleotides in length; and there are at least 16, 19, 21, 26, 31, 32, 36, 41, 46, 50, 51, or 54 nucleotides 3′ to the last nucleotide of the second complementarity domain that is complementary to its corresponding nucleotide of the first complementarity domain.

[0793] In an embodiment, the unimolecular, or chimeric, gRNA molecule (comprising a targeting domain, a first complementary domain, a linking domain, a second complementary domain, a proximal domain and, optionally, a tail domain) comprises the following sequence in which the targeting domain is depicted as 20 Ns but could be any sequence and range in length from 16 to 26 nucleotides and in which the gRNA sequence is followed by 6 Us, which serve as a termination signal for the U6 promoter, but which could be either absent or fewer in number: NNNNNNNNNNNNNNNNNNNNGUUUUAGAGCUAGAAAUAGCAAGUUAAAAUAAGGCU AGUCCGUUAUCAACUUGAAAAAGUGGCACCGAGUCGGUGCUUUUUU (SEQ ID NO: 45). In an embodiment, the unimolecular, or chimeric, gRNA molecule is a S. pyogenes gRNA molecule.

[0794] In some embodiments, the unimolecular, or chimeric, gRNA molecule (comprising a targeting domain, a first complementary domain, a linking domain, a second complementary domain, a proximal domain and, optionally, a tail domain) comprises the following sequence in which the targeting domain is depicted as 20 Ns but could be any sequence and range in length from 16 to 26 nucleotides and in which the gRNA sequence is followed by 6 Us, which serve as a termination signal for the U6 promoter, but which could be either absent or fewer in number: NNNNNNNNNNNNNNNNNNNNGUUUUAGUACUCUGGAAACAGAAUCUACUAAAACAA GGCAAAAUGCCGUGUUUAUCUCGUCAACUUGUUGGCGAGAUUUUUU (SEQ ID NO: 2779) (corresponding DNA sequence in SEQ ID NO: 2785). In an embodiment, the unimolecular, or chimeric, gRNA molecule is a S. aureus gRNA molecule.

[0795] The sequences and structures of exemplary chimeric gRNAs of SEQ ID NOs: 45 and 2779 are shown in FIGS. 18A-18B, respectively.

Exemplary Modular gRNAs

[0796] In an embodiment, a modular gRNA comprises:
[0797] a first strand comprising, preferably from 5′ to 3′:
[0798] a targeting domain, e.g., comprising 15, 16, 17, 18, 19, 20, 21, 22, 23, 24, 25, or 26 nucleotides;
[0799] a first complementarity domain; and
[0800] a second strand, comprising, preferably from 5′ to 3′:
[0801] optionally a 5′ extension domain;
[0802] a second complementarity domain;
[0803] a proximal domain; and
[0804] a tail domain,
[0805] wherein:
[0806] (a) the proximal and tail domain, when taken together, comprise at least 15, 18, 20, 25, 30, 31, 35, 40, 45, 49, 50, or 53 nucleotides;
[0807] (b) there are at least 15, 18, 20, 25, 30, 31, 35, 40, 45, 49, 50, or 53 nucleotides 3′ to the last nucleotide of the second complementarity domain; or
[0808] (c) there are at least 16, 19, 21, 26, 31, 32, 36, 41, 46, 50, 51, or 54 nucleotides 3′ to the last nucleotide of the second complementarity domain that is complementary to its corresponding nucleotide of the first complementarity domain.

[0809] In an embodiment, the sequence from (a), (b), or (c), has at least 60, 75, 80, 85, 90, 95, or 99% homology with the corresponding sequence of a naturally occurring gRNA, or with a gRNA described herein.

[0810] In an embodiment, the proximal and tail domain, when taken together, comprise at least 15, 18, 20, 25, 30, 31, 35, 40, 45, 49, 50, or 53 nucleotides.

[0811] In an embodiment, there are at least 15, 18, 20, 25, 30, 31, 35, 40, 45, 49, 50, or 53 nucleotides 3′ to the last nucleotide of the second complementarity domain.

[0812] In an embodiment, there are at least 16, 19, 21, 26, 31, 32, 36, 41, 46, 50, 51, or 54 nucleotides 3′ to the last nucleotide of the second complementarity domain that is complementary to its corresponding nucleotide of the first complementarity domain.

[0813] In an embodiment, the targeting domain comprises, has, or consists of, 16, 17, 18, 19, 20, 21, 22, 23, 24, 25 or 26 nucleotides (e.g., 16, 17, 18, 19, 20, 21, 22, 23, 24, 25 or 26 consecutive nucleotides) having complementarity with the target domain, e.g., the targeting domain is 16, 17, 18, 19, 20, 21, 22, 23, 24, 25 or 26 nucleotides in length.

[0814] In an embodiment, the targeting domain comprises, has, or consists of, 16 nucleotides (e.g., 16 consecutive nucleotides) having complementarity with the target domain, e.g., the targeting domain is 16 nucleotides in length.

[0815] In an embodiment, the targeting domain comprises, has, or consists of, 17 nucleotides (e.g., 17 consecutive nucleotides) having complementarity with the target domain, e.g., the targeting domain is 17 nucleotides in length.

[0816] In an embodiment, the targeting domain comprises, has, or consists of, 18 nucleotides (e.g., 18 consecutive nucleotides) having complementarity with the target domain, e.g., the targeting domain is 18 nucleotides in length.

[0817] In an embodiment, the targeting domain comprises, has, or consists of, 19 nucleotides (e.g., 19 consecutive nucleotides) having complementarity with the target domain, e.g., the targeting domain is 19 nucleotides in length.

[0818] In an embodiment, the targeting domain comprises, has, or consists of, 20 nucleotides (e.g., 20 consecutive nucleotides) having complementarity with the target domain, e.g., the targeting domain is 20 nucleotides in length.

[0819] In an embodiment, the targeting domain comprises, has, or consists of, 21 nucleotides (e.g., 21 consecutive nucleotides) having complementarity with the target domain, e.g., the targeting domain is 21 nucleotides in length.

[0820] In an embodiment, the targeting domain comprises, has, or consists of, 22 nucleotides (e.g., 22 consecutive nucleotides) having complementarity with the target domain, e.g., the targeting domain is 22 nucleotides in length.

[0821] In an embodiment, the targeting domain comprises, has, or consists of, 23 nucleotides (e.g., 23 consecutive nucleotides) having complementarity with the target domain, e.g., the targeting domain is 23 nucleotides in length.

[0822] In an embodiment, the targeting domain comprises, has, or consists of, 24 nucleotides (e.g., 24 consecutive nucleotides) having complementarity with the target domain, e.g., the targeting domain is 24 nucleotides in length.

[0823] In an embodiment, the targeting domain comprises, has, or consists of, 25 nucleotides (e.g., 25 consecutive nucleotides) having complementarity with the target domain, e.g., the targeting domain is 25 nucleotides in length.

[0824] In an embodiment, the targeting domain comprises, has, or consists of, 26 nucleotides (e.g., 26 consecutive nucleotides) having complementarity with the target domain, e.g., the targeting domain is 26 nucleotides in length.

[0825] In an embodiment, the targeting domain comprises, has, or consists of, 16 nucleotides (e.g., 16 consecutive nucleotides) having complementarity with the target domain, e.g., the targeting domain is 16 nucleotides in length; and the proximal and tail domain, when taken together, comprise at least 15, 18, 20, 25, 30, 31, 35, 40, 45, 49, 50, or 53 nucleotides.

[0826] In an embodiment, the targeting domain comprises, has, or consists of, 16 nucleotides (e.g., 16 consecutive nucleotides) having complementarity with the target domain, e.g., the targeting domain is 16 nucleotides in length; and there are at least 15, 18, 20, 25, 30, 31, 35, 40, 45, 49, 50, or 53 nucleotides 3′ to the last nucleotide of the second complementarity domain.

[0827] In an embodiment, the targeting domain comprises, has, or consists of, 16 nucleotides (e.g., 16 consecutive nucleotides) having complementarity with the target domain, e.g., the targeting domain is 16 nucleotides in length; and there are at least 16, 19, 21, 26, 31, 32, 36, 41, 46, 50, 51, or 54 nucleotides 3′ to the last nucleotide of the second complementarity domain that is complementary to its corresponding nucleotide of the first complementarity domain.

[0828] In an embodiment, the targeting domain comprises, has, or consists of, 17 nucleotides (e.g., 17 consecutive nucleotides) having complementarity with the target domain, e.g., the targeting domain is 17 nucleotides in length; and the proximal and tail domain, when taken together, comprise at least 15, 18, 20, 25, 30, 31, 35, 40, 45, 49, 50, or 53 nucleotides.

[0829] In an embodiment, the targeting domain comprises, has, or consists of, 17 nucleotides (e.g., 17 consecutive nucleotides) having complementarity with the target domain, e.g., the targeting domain is 17 nucleotides in length; and there are at least 15, 18, 20, 25, 30, 31, 35, 40, 45, 49, 50, or 53 nucleotides 3′ to the last nucleotide of the second complementarity domain.

[0830] In an embodiment, the targeting domain comprises, has, or consists of, 17 nucleotides (e.g., 17 consecutive nucleotides) having complementarity with the target domain, e.g., the targeting domain is 17 nucleotides in length; and there are at least 16, 19, 21, 26, 31, 32, 36, 41, 46, 50, 51, or 54 nucleotides 3′ to the last nucleotide of the second complementarity domain that is complementary to its corresponding nucleotide of the first complementarity domain.

[0831] In an embodiment, the targeting domain comprises, has, or consists of, 18 nucleotides (e.g., 18 consecutive nucleotides) having complementarity with the target domain, e.g., the targeting domain is 18 nucleotides in length; and the proximal and tail domain, when taken together, comprise at least 15, 18, 20, 25, 30, 31, 35, 40, 45, 49, 50, or 53 nucleotides.

[0832] In an embodiment, the targeting domain comprises, has, or consists of, 18 nucleotides (e.g., 18 consecutive nucleotides) having complementarity with the target domain, e.g., the targeting domain is 18 nucleotides in length; and there are at least 15, 18, 20, 25, 30, 31, 35, 40, 45, 49, 50, or 53 nucleotides 3′ to the last nucleotide of the second complementarity domain.

[0833] In an embodiment, the targeting domain comprises, has, or consists of, 18 nucleotides (e.g., 18 consecutive nucleotides) having complementarity with the target domain, e.g., the targeting domain is 18 nucleotides in length; and there are at least 16, 19, 21, 26, 31, 32, 36, 41, 46, 50, 51, or 54 nucleotides 3′ to the last nucleotide of the second complementarity domain that is complementary to its corresponding nucleotide of the first complementarity domain.

[0834] In an embodiment, the targeting domain comprises, has, or consists of, 19 nucleotides (e.g., 19 consecutive nucleotides) having complementarity with the target domain, e.g., the targeting domain is 19 nucleotides in length; and the proximal and tail domain, when taken together, comprise at least 15, 18, 20, 25, 30, 31, 35, 40, 45, 49, 50, or 53 nucleotides.

[0835] In an embodiment, the targeting domain comprises, has, or consists of, 19 nucleotides (e.g., 19 consecutive nucleotides) having complementarity with the target domain, e.g., the targeting domain is 19 nucleotides in length; and there are at least 15, 18, 20, 25, 30, 31, 35, 40, 45, 49, 50, or 53 nucleotides 3′ to the last nucleotide of the second complementarity domain.

[0836] In an embodiment, the targeting domain comprises, has, or consists of, 19 nucleotides (e.g., 19 consecutive nucleotides) having complementarity with the target domain, e.g., the targeting domain is 19 nucleotides in length; and there are at least 16, 19, 21, 26, 31, 32, 36, 41, 46, 50, 51, or 54 nucleotides 3′ to the last nucleotide of the second complementarity domain that is complementary to its corresponding nucleotide of the first complementarity domain.

[0837] In an embodiment, the targeting domain comprises, has, or consists of, 20 nucleotides (e.g., 20 consecutive nucleotides) having complementarity with the target domain, e.g., the targeting domain is 20 nucleotides in length; and the proximal and tail domain, when taken together, comprise at least 15, 18, 20, 25, 30, 31, 35, 40, 45, 49, 50, or 53 nucleotides.

[0838] In an embodiment, the targeting domain comprises, has, or consists of, 20 nucleotides (e.g., 20 consecutive nucleotides) having complementarity with the target domain, e.g., the targeting domain is 20 nucleotides in length; and there are at least 15, 18, 20, 25, 30, 31, 35, 40, 45, 49, 50, or 53 nucleotides 3′ to the last nucleotide of the second complementarity domain.

[0839] In an embodiment, the targeting domain comprises, has, or consists of, 20 nucleotides (e.g., 20 consecutive nucleotides) having complementarity with the target domain, e.g., the targeting domain is 20 nucleotides in length; and there are at least 16, 19, 21, 26, 31, 32, 36, 41, 46, 50, 51, or 54 nucleotides 3′ to the last nucleotide of the second complementarity domain that is complementary to its corresponding nucleotide of the first complementarity domain.

[0840] In an embodiment, the targeting domain comprises, has, or consists of, 21 nucleotides (e.g., 21 consecutive nucleotides) having complementarity with the target domain, e.g., the targeting domain is 21 nucleotides in length; and the proximal and tail domain, when taken together, comprise at least 15, 18, 20, 25, 30, 31, 35, 40, 45, 49, 50, or 53 nucleotides.

[0841] In an embodiment, the targeting domain comprises, has, or consists of, 21 nucleotides (e.g., 21 consecutive nucleotides) having complementarity with the target domain, e.g., the targeting domain is 21 nucleotides in length; and there are at least 15, 18, 20, 25, 30, 31, 35, 40, 45, 49, 50, or 53 nucleotides 3′ to the last nucleotide of the second complementarity domain.

[0842] In an embodiment, the targeting domain comprises, has, or consists of, 21 nucleotides (e.g., 21 consecutive nucleotides) having complementarity with the target domain, e.g., the targeting domain is 21 nucleotides in length; and there are at least 16, 19, 21, 26, 31, 32, 36, 41, 46, 50, 51, or 54 nucleotides 3′ to the last nucleotide of the second complementarity domain that is complementary to its corresponding nucleotide of the first complementarity domain.

[0843] In an embodiment, the targeting domain comprises, has, or consists of, 22 nucleotides (e.g., 22 consecutive nucleotides) having complementarity with the target domain, e.g., the targeting domain is 22 nucleotides in length; and the proximal and tail domain, when taken together, comprise at least 15, 18, 20, 25, 30, 31, 35, 40, 45, 49, 50, or 53 nucleotides.

[0844] In an embodiment, the targeting domain comprises, has, or consists of, 22 nucleotides (e.g., 22 consecutive nucleotides) having complementarity with the target domain, e.g., the targeting domain is 22 nucleotides in length; and there are at least 15, 18, 20, 25, 30, 31, 35, 40, 45, 49, 50, or 53 nucleotides 3′ to the last nucleotide of the second complementarity domain.

[0845] In an embodiment, the targeting domain comprises, has, or consists of, 22 nucleotides (e.g., 22 consecutive nucleotides) having complementarity with the target domain, e.g., the targeting domain is 22 nucleotides in length; and there are at least 16, 19, 21, 26, 31, 32, 36, 41, 46, 50, 51, or 54 nucleotides 3′ to the last nucleotide of the second complementarity domain that is complementary to its corresponding nucleotide of the first complementarity domain.

[0846] In an embodiment, the targeting domain comprises, has, or consists of, 23 nucleotides (e.g., 23 consecutive nucleotides) having complementarity with the target domain, e.g., the targeting domain is 23 nucleotides in length; and the proximal and tail domain, when taken together, comprise at least 15, 18, 20, 25, 30, 31, 35, 40, 45, 49, 50, or 53 nucleotides.

[0847] In an embodiment, the targeting domain comprises, has, or consists of, 23 nucleotides (e.g., 23 consecutive nucleotides) having complementarity with the target domain, e.g., the targeting domain is 23 nucleotides in length; and there are at least 15, 18, 20, 25, 30, 31, 35, 40, 45, 49, 50, or 53 nucleotides 3′ to the last nucleotide of the second complementarity domain.

[0848] In an embodiment, the targeting domain comprises, has, or consists of, 23 nucleotides (e.g., 23 consecutive nucleotides) having complementarity with the target domain, e.g., the targeting domain is 23 nucleotides in length; and there are at least 16, 19, 21, 26, 31, 32, 36, 41, 46, 50, 51, or 54 nucleotides 3′ to the last nucleotide of the second complementarity domain that is complementary to its corresponding nucleotide of the first complementarity domain.

[0849] In an embodiment, the targeting domain comprises, has, or consists of, 24 nucleotides (e.g., 24 consecutive nucleotides) having complementarity with the target domain, e.g., the targeting domain is 24 nucleotides in length; and the proximal and tail domain, when taken together, comprise at least 15, 18, 20, 25, 30, 31, 35, 40, 45, 49, 50, or 53 nucleotides.

[0850] In an embodiment, the targeting domain comprises, has, or consists of, 24 nucleotides (e.g., 24 consecutive nucleotides) having complementarity with the target domain, e.g., the targeting domain is 24 nucleotides in length; and there are at least 15, 18, 20, 25, 30, 31, 35, 40, 45, 49, 50, or 53 nucleotides 3′ to the last nucleotide of the second complementarity domain.

[0851] In an embodiment, the targeting domain comprises, has, or consists of, 24 nucleotides (e.g., 24 consecutive nucleotides) having complementarity with the target domain, e.g., the targeting domain is 24 nucleotides in length; and there are at least 16, 19, 21, 26, 31, 32, 36, 41, 46, 50, 51, or 54 nucleotides 3′ to the last nucleotide of the second complementarity domain that is complementary to its corresponding nucleotide of the first complementarity domain.

[0852] In an embodiment, the targeting domain comprises, has, or consists of, 25 nucleotides (e.g., 25 consecutive nucleotides) having complementarity with the target domain, e.g., the targeting domain is 25 nucleotides in length; and the proximal and tail domain, when taken together, comprise at least 15, 18, 20, 25, 30, 31, 35, 40, 45, 49, 50, or 53 nucleotides.

[0853] In an embodiment, the targeting domain comprises, has, or consists of, 25 nucleotides (e.g., 25 consecutive nucleotides) having complementarity with the target domain, e.g., the targeting domain is 25 nucleotides in length; and there are at least 15, 18, 20, 25, 30, 31, 35, 40, 45, 49, 50, or 53 nucleotides 3′ to the last nucleotide of the second complementarity domain.

[0854] In an embodiment, the targeting domain comprises, has, or consists of, 25 nucleotides (e.g., 25 consecutive nucleotides) having complementarity with the target domain, e.g., the targeting domain is 25 nucleotides in length; and there are at least 16, 19, 21, 26, 31, 32, 36, 41, 46, 50, 51, or 54 nucleotides 3′ to the last nucleotide of the second complementarity domain that is complementary to its corresponding nucleotide of the first complementarity domain.

[0855] In an embodiment, the targeting domain comprises, has, or consists of, 26 nucleotides (e.g., 26 consecutive nucleotides) having complementarity with the target domain, e.g., the targeting domain is 26 nucleotides in length; and the proximal and tail domain, when taken together, comprise at least 15, 18, 20, 25, 30, 31, 35, 40, 45, 49, 50, or 53 nucleotides.

[0856] In an embodiment, the targeting domain comprises, has, or consists of, 26 nucleotides (e.g., 26 consecutive nucleotides) having complementarity with the target domain, e.g., the targeting domain is 26 nucleotides in length; and there are at least 15, 18, 20, 25, 30, 31, 35, 40, 45, 49, 50, or 53 nucleotides 3′ to the last nucleotide of the second complementarity domain.

[0857] In an embodiment, the targeting domain comprises, has, or consists of, 26 nucleotides (e.g., 26 consecutive nucleotides) having complementarity with the target domain, e.g., the targeting domain is 26 nucleotides in length; and there are at least 16, 19, 21, 26, 31, 32, 36, 41, 46, 50, 51, or 54 nucleotides 3′ to the last nucleotide of the second complementarity domain that is complementary to its corresponding nucleotide of the first complementarity domain.

gRNA Modifications

[0858] The activity, stability, or other characteristics of gRNAs can be altered through the incorporation of chemical and/or sequential modifications. As one example, transiently expressed or delivered nucleic acids can be prone to degradation by, e.g., cellular nucleases. Accordingly, the gRNAs described herein can contain one or more modified nucleosides or nucleotides which introduce stability toward nucleases. While not wishing to be bound by theory it is also believed that certain modified gRNAs described herein can exhibit a reduced innate immune response when introduced into a population of cells, particularly the cells of the present invention. As noted above, the term “innate immune response” includes a cellular response to exogenous nucleic acids, including single stranded nucleic acids, generally of viral or bacterial origin, which involves the induction of cytokine expression and release, particularly the interferons, and cell death.

[0859] One common 3′ end modification is the addition of a poly A tract comprising one or more (and typically 5-200) adenine (A) residues. The poly A tract can be contained in the nucleic acid sequence encoding the gRNA, or can be added to the gRNA during chemical synthesis, or following in vitro transcription using a polyadenosine polymerase (e.g., E. coli Poly(A) Polymerase). In vivo, poly-A tracts can be added to sequences transcribed from DNA vectors through the use of polyadenylation signals. Examples of such signals are provided in Maeder.

III. Methods for Designing gRNAs

[0860] Methods for designing gRNAs are described herein, including methods for selecting, designing and validating target domains. Exemplary targeting domains are also provided herein. Targeting Domains discussed herein can be incorporated into the gRNAs described herein.

[0861] Methods for selection and validation of target sequences as well as off-target analyses are described, e.g., in Mali 2013; Hsu 2013; Fu 2014; Heigwer 2014; Bae 2014; Xiao 2014.

[0862] For example, a software tool can be used to optimize the choice of gRNA within a user's target sequence, e.g., to minimize total off-target activity across the genome. Off target activity may be other than cleavage. For each possible gRNA choice using S. pyogenes Cas9, software tools can identify all potential off-target sequences (preceding either NAG or NGG PAMs) across the genome that contain up to a certain number (e.g., 1, 2, 3, 4, 5, 6, 7, 8, 9, or 10) of mismatched base-pairs. The cleavage efficiency at each off-target sequence can be predicted, e.g., using an experimentally-derived weighting scheme. Each possible gRNA can then ranked according to its total predicted off-target cleavage; the top-ranked gRNAs represent those that are likely to have the greatest on-target and the least off-target cleavage. Other functions, e.g., automated reagent design for gRNA vector construction, primer design for the on-target Surveyor assay, and primer design for high-throughput detection and quantification of off-target cleavage via next-generation sequencing, can also be included in the tool. Candidate gRNA molecules can be evaluated by art-known methods or as described in Section V herein.

[0863] Guide RNAs (gRNAs) for use with S. pyogenes, S. aureus and N. meningitidis Cas9s were identified using a DNA sequence searching algorithm. Guide RNA design was carried out using a custom guide RNA design software based on the public tool cas-offinder (Bae 2014). Said custom guide RNA design software scores guides after calculating their genomewide off-target propensity. Typically matches ranging from perfect matches to 7 mismatches are considered for guides ranging in length from 17 to 24. Once the off-target sites are computationally determined, an aggregate score is calculated for each guide and summarized in a tabular output using a web-interface. In addition to identifying potential gRNA sites adjacent to PAM sequences, the software also identifies all PAM adjacent sequences that differ by 1, 2, 3 or more nucleotides from the selected gRNA sites. Genomic DNA sequence for each gene was obtained from the UCSC Genome browser and sequences were screened for repeat elements using the publically available RepeatMasker program. RepeatMasker searches input DNA sequences for repeated elements and regions of low complexity. The output is a detailed annotation of the repeats present in a given query sequence.

[0864] Following identification, gRNAs were ranked into tiers based on their distance to the target site, their orthogonality and presence of a 5′ G (based on identification of close matches in the human genome containing a relevant PAM, e.g., in the case of S. pyogenes, a NGG PAM, in the case of S. aureus, NNGRR (e.g., a NNGRRT or NNGRRV) PAM, and in the case of N. meningitides, a NNNNGATT or NNNNGCTT PAM. Orthogonality refers to the number of sequences in the human genome that contain a minimum number of mismatches to the target sequence. A “high level of orthogonality” or “good orthogonality” may, for example, refer to 20-mer gRNAs that have no identical sequences in the human genome besides the intended target, nor any sequences that contain one or two mismatches in the target sequence. Targeting domains with good orthogonality are selected to minimize off-target DNA cleavage.

[0865] As an example, for S. pyogenes and N. meningitides targets, 17-mer, or 20-mer gRNAs were designed. As another example, for S. aureus targets, 18-mer, 19-mer, 20-mer, 21-mer, 22-mer, 23-mer and 24-mer gRNAs were designed. Targeting domains, disclosed herein, may comprises the 17-mer described in Tables 2A-2D, Tables 3A-3C, Tables 4A-4D, Tables 5A-5D, Tables 6A-6B, Tables 7A-7D, Tables 8A-8D, Tables 9A-9E, Tables 10A-10B, or Table 11, e.g., the targeting domains of 18 or more nucleotides may comprise the 17-mer gRNAs described in Tables 2A-2D, Tables 3A-3C, Tables 4A-4D, Tables 5A-5D, Tables 6A-6B, Tables 7A-7D, Tables 8A-8D, Tables 9A-9E, Tables 10A-10B, or Table 11. Targeting domains, disclosed herein, may comprises the 18-mer described in Tables 2A-2D, Tables 3A-3C, Tables 4A-4D, Tables 5A-5D, Tables 6A-6B, Tables 7A-7D, Tables 8A-8D, Tables 9A-9E, Tables 10A-10B, or Table 11, e.g., the targeting domains of 19 or more nucleotides may comprise the 18-mer gRNAs described in Tables 2A-2D, Tables 3A-3C, Tables 4A-4D, Tables 5A-5D, Tables 6A-6B, Tables 7A-7D, Tables 8A-8D, Tables 9A-9E, Tables 10A-10B, or Table 11. Targeting domains, disclosed herein, may comprises the 19-mer described in Tables 2A-2D, Tables 3A-3C, Tables 4A-4D, Tables 5A-5D, Tables 6A-6B, Tables 7A-7D, Tables 8A-8D, Tables 9A-9E, Tables 10A-10B, or Table 11, e.g., the targeting domains of 20 or more nucleotides may comprise the 19-mer gRNAs described in Tables 2A-2D, Tables 3A-3C, Tables 4A-4D, Tables 5A-5D, Tables 6A-6B, Tables 7A-7D, Tables 8A-8D, Tables 9A-9E, Tables 10A-10B, or Table 11. Targeting domains, disclosed herein, may comprises the 20-mer gRNAs described in Tables 2A-2D, Tables 3A-3C, Tables 4A-4D, Tables 5A-5D, Tables 6A-6B, Tables 7A-7D, Tables 8A-8D, Tables 9A-9E, Tables 10A-10B, or Table 11, e.g., the targeting domains of 21 or more nucleotides may comprise the 20-mer gRNAs described in Tables 2A-2D, Tables 3A-3C, Tables 4A-4D, Tables 5A-5D, Tables 6A-6B, Tables 7A-7D, Tables 8A-8D, Tables 9A-9E, Tables 10A-10B, or Table 11. Targeting domains, disclosed herein, may comprises the 21-mer described in Tables 2A-2D, Tables 3A-3C, Tables 4A-4D, Tables 5A-5D, Tables 6A-6B, Tables 7A-7D, Tables 8A-8D, Tables 9A-9E, Tables 10A-10B, or Table 11, e.g., the targeting domains of 22 or more nucleotides may comprise the 21-mer gRNAs described in Tables 2A-2D, Tables 3A-3C, Tables 4A-4D, Tables 5A-5D, Tables 6A-6B, Tables 7A-7D, Tables 8A-8D, Tables 9A-9E, Tables 10A-10B, or Table 11. Targeting domains, disclosed herein, may comprises the 22-mer described in Tables 2A-2D, Tables 3A-3C, Tables 4A-4D, Tables 5A-5D, Tables 6A-6B, Tables 7A-7D, Tables 8A-8D, Tables 9A-9E, Tables 10A-10B, or Table 11, e.g., the targeting domains of 23 or more nucleotides may comprise the 22-mer gRNAs described in Tables 2A-2D, Tables 3A-3C, Tables 4A-4D, Tables 5A-5D, Tables 6A-6B, Tables 7A-7D, Tables 8A-8D, Tables 9A-9E, Tables 10A-10B, or Table 11. Targeting domains, disclosed herein, may comprises the 23-mer described in Tables 2A-2D, Tables 3A-3C, Tables 4A-4D, Tables 5A-5D, Tables 6A-6B, Tables 7A-7D, Tables 8A-8D, Tables 9A-9E, Tables 10A-10B, or Table 11, e.g., the targeting domains of 24 or more nucleotides may comprise the 23-mer gRNAs described in Tables 2A-2D, Tables 3A-3C, Tables 4A-4D, Tables 5A-5D, Tables 6A-6B, Tables 7A-7D, Tables 8A-8D, Tables 9A-9E, Tables 10A-10B, or Table 11. Targeting domains, disclosed herein, may comprises the 24-mer described in Tables 2A-2D, Tables 3A-3C, Tables 4A-4D, Tables 5A-5D, Tables 6A-6B, Tables 7A-7D, Tables 8A-8D, Tables 9A-9E, Tables 10A-10B, or Table 11, e.g., the targeting domains of 25 or more nucleotides may comprise the 24-mer gRNAs described in Tables 2A-2D, Tables 3A-3C, Tables 4A-4D, Tables 5A-5D, Tables 6A-6B, Tables 7A-7D, Tables 8A-8D, Tables 9A-9E, Tables 10A-10B, or Table 11.

[0866] gRNAs were identified for both single-gRNA nuclease cleavage and for a dual-gRNA paired “nickase” strategy. Criteria for selecting gRNAs and the determination for which gRNAs can be used for the dual-gRNA paired “nickase” strategy is based on two considerations:
[0867] 1. gRNA pairs should be oriented on the DNA such that PAMs are facing out and cutting with the D10A Cas9 nickase will result in 5′ overhangs.
[0868] 2. An assumption that cleaving with dual nickase pairs will result in deletion of the entire intervening sequence at a reasonable frequency. However, cleaving with dual nickase pairs can also result in indel mutations at the site of only one of the gRNAs. Candidate pair members can be tested for how efficiently they remove the entire sequence versus causing indel mutations at the site of one gRNA.

[0869] The Targeting Domains discussed herein can be incorporated into the gRNAs described herein.

[0870] Three strategies were utilized to identify gRNAs for use with S. pyogenes, S. aureus and N. meningitidis Cas9 enzymes.

[0871] In one strategy, gRNAs were designed for use with S. pyogenes and S. aureus Cas9 enzymes to induce an indel mediated by NHEJ in close proximity to or including the LCA10 target position (e.g., c.2991+1655A to G). The gRNAs were identified and ranked into 4 tiers for S. pyogenes (Tables 2A-2D). The targeting domain for tier 1 gRNA molecules to be used with S. pyogenes Cas9 molecules were selected based on (1) a short distance to the target position, e.g., within 40 bp upstream and 40 bp downstream of the mutation, (2) a high level of orthogonality, and (3) the presence of a 5′ G. For selection of tier 2 gRNAs, a short distance and high orthogonality were required but the presence of a 5′G was not required. Tier 3 uses the same distance restriction and the requirement for a 5′G, but removes the requirement of good orthogonality. Tier 4 uses the same distance restriction but removes the requirement of good orthogonality and the 5′G. The gRNAs were identified and ranked into 4 tiers for S. aureus, when the relevant PAM was NNGRR (Tables 3A-3C). The targeting domain for tier 1 gRNA molecules to be used with S. pyogenes Cas9 molecules were selected based on (1) a short distance to the target position, e.g., within 40 bp upstream and 40 bp downstream of the mutation, (2) a high level of orthogonality, and (3) the presence of a 5′ G. For selection of tier 2 gRNAs, a short distance and high orthogonality were required but the presence of a 5′G was not required. Tier 3 uses the same distance restriction and the requirement for a 5′G, but removes the requirement of good orthogonality. Tier 4 uses the same distance restriction but removes the requirement of good orthogonality and the 5′G. The gRNAs were identified and ranked into 5 tiers for S. aureus when the relevant PAM was NNGRRT or NNGRRV (Tables 7A-7D). The targeting domain for tier 1 gRNA molecules to be used with S. aureus Cas9 molecules were selected based on (1) a short distance to the target position, e.g., within 40 bp upstream and 40 bp downstream of the mutation, (2) a high level of orthogonality, (3) the presence of a 5′ G and (4) PAM was NNGRRT. For selection of tier 2 gRNAs, a short distance and high orthogonality were required but the presence of a 5′G was not required, and PAM was NNGRRT. Tier 3 uses the same distance restriction and the requirement for a 5′G, but removes the requirement of good orthogonality, and PAM was NNGRRT. Tier 4 uses the same distance restriction but removes the requirement of good orthogonality and the 5′G, and PAM was NNGRRT. Tier 5 required a short distance to the target position, e.g., within 40 bp upstream and 40 bp downstream of the mutation and PAM was NNGRRV. Note that tiers are non-inclusive (each gRNA is listed only once for the strategy). In certain instances, no gRNA was identified based on the criteria of the particular tier.

[0872] In a second strategy, gRNAs were designed for use with S. pyogenes, S. aureus and N. meningitidis Cas9 molecules to delete a genomic sequence including the mutation at the LCA10 target position (e.g., c.2991+1655A to G), e.g., mediated by NHEJ. The gRNAs were identified and ranked into 4 tiers for S. pyogenes (Tables 4A-4D). The targeting domain to be used with S. pyogenes Cas9 molecules for tier 1 gRNA molecules were selected based on (1) flanking the mutation without targeting unwanted chromosome elements, such as an Alu repeat, e.g., within 400 bp upstream of an Alu repeat or 700 bp downstream of mutation, (2) a high level of orthogonality, and (3) the presence of a 5′ G. For selection of tier 2 gRNAs, a reasonable distance and high orthogonality were required but the presence of a 5′G was not required. Tier 3 uses the same distance restriction and the requirement for a 5′G, but removes the requirement of good orthogonality. Tier 4 uses the same distance restriction but removes the requirement of good orthogonality and the 5′G. The gRNAs were identified and ranked into 4 tiers for S. aureus, when the relevant PAM was NNGRR (Tables 5A-5D). The targeting domain to be used with S. aureus Cas9 molecules for tier 1 gRNA molecules were selected based on (1) flanking the mutation without targeting unwanted chromosome elements, such as an Alu repeat, e.g., within 400 bp upstream of an Alu repeat or 700 bp downstream of mutation, (2) a high level of orthogonality, and (3) the presence of a 5′ G. For selection of tier 2 gRNAs, a reasonable distance and high orthogonality were required but the presence of a 5′G was not required. Tier 3 uses the same distance restriction and the requirement for a 5′G, but removes the requirement of good orthogonality. Tier 4 uses the same distance restriction but removes the requirement of good orthogonality and the 5′G. The gRNAs were identified and ranked into 2 tiers for N. meningitides (Tables 6A-6B). The targeting domain to be used with N. meningitides Cas9 molecules for tier 1 gRNA molecules were selected based on (1) flanking the mutation without targeting unwanted chromosome elements, such as an Alu repeat, e.g., within 400 bp upstream of an Alu repeat or 700 bp downstream of mutation, (2) a high level of orthogonality, and (3) the presence of a 5′ G. For selection of tier 2 gRNAs, a reasonable distance and high orthogonality were required but the presence of a 5′G was not required. Note that tiers are non-inclusive (each gRNA is listed only once for the strategy). In certain instances, no gRNA was identified based on the criteria of the particular tier. In a third strategy, gRNAs were designed for use with S. pyogenes, S. aureus and N. meningitidis Cas9 molecules to delete a genomic sequence including the mutation at the LCA10 target position (e.g., c.2991+1655A to G), e.g., mediated by NHEJ. The gRNAs were identified and ranked into 4 tiers for S. pyogenes (Tables 8A-8D). The targeting domain to be used with S. pyogenes Cas9 enzymes for tier 1 gRNA molecules were selected based on (1) flanking the mutation without targeting unwanted chromosome elements, such as an Alu repeat, e.g., within 1000 bp upstream of an Alu repeat or 1000 bp downstream of mutation, (2) a high level of orthogonality, (3) the presence of a 5′ G and (4) and PAM was NNGRRT. For selection of tier 2 gRNAs, a reasonable distance and high orthogonality were required but the presence of a 5′G was not required, and PAM was NNGRRT. Tier 3 uses the same distance restriction and the requirement for a 5′G, but removes the requirement of good orthogonality, and PAM was NNGRRT. Tier 4 uses the same distance restriction but removes the requirement of good orthogonality and the 5′G, and PAM was NNGRRT. The gRNAs were identified and ranked into 4 tiers for S. aureus, when the relevant PAM was NNGRRT or NNGRRV (Tables 9A-9E). The targeting domain to be used with S. aureus Cas9 enzymes for tier 1 gRNA molecules were selected based on (1) flanking the mutation without targeting unwanted chromosome elements, such as an Alu repeat, e.g., within 1000 bp upstream of an Alu repeat or 1000 bp downstream of mutation, (2) a high level of orthogonality, and (3) the presence of a 5′ G. For selection of tier 2 gRNAs, a reasonable distance and high orthogonality were required but the presence of a 5′G was not required. Tier 3 uses the same distance restriction and the requirement for a 5′G, but removes the requirement of good orthogonality. Tier 4 uses the same distance restriction but removes the requirement of good orthogonality and the 5′G. Tier 5 used the same distance restriction and PAM was NNGRRV. The gRNAs were identified and ranked into 2 tiers for N. meningitides (Tables 10A-10B). The targeting domain to be used with N. meningitides Cas9 molecules for tier 1 gRNA molecules were selected based on (1) flanking the mutation without targeting unwanted chromosome elements, such as an Alu repeat, e.g., within 1000 bp upstream of an Alu repeat or 1000 bp downstream of mutation, (2) a high level of orthogonality, and (3) the presence of a 5′ G. For selection of tier 2 gRNAs, a reasonable distance and high orthogonality were required but the presence of a 5′G was not required. Note that tiers are non-inclusive (each gRNA is listed only once for the strategy). In certain instances, no gRNA was identified based on the criteria of the particular tier.

[0873] In an embodiment, when a single gRNA molecule is used to target a Cas9 nickase to create a single strand break to introduce a break-induced indel in close proximity to or including the LCA10 target position, the gRNA is used to target either upstream of (e.g., within 40 bp upstream of the LCA10 target position), or downstream of (e.g., within 40 bp downstream of the LCA10 target position) in the CEP290 gene.

[0874] In an embodiment, when a single gRNA molecule is used to target a Cas9 nuclease to create a double strand break to introduce a break-induced indel in close proximity to or including the LCA10 target position, the gRNA is used to target either upstream of (e.g., within 40 bp upstream of the LCA10 target position), or downstream of (e.g., within 40 bp downstream of the LCA10 target position) in the CEP290 gene.

[0875] In an embodiment, dual targeting is used to create two double strand breaks to delete a genomic sequence including the mutation at the LCA10 target position, e.g., mediated by NHEJ. In an embodiment, the first and second gRNAs are used target two Cas9 nucleases to flank, e.g., the first of gRNA is used to target upstream of (e.g., within 400 bp upstream of the Alu repeat, or within 40 bp upstream of the LCA10 target position), and the second gRNA is used to target downstream of (e.g., within 700 bp downstream of the LCA10 target position) in the CEP290 gene.

[0876] In an embodiment, dual targeting is used to create a double strand break and a pair of single strand breaks to delete a genomic sequence including the mutation at the LCA10 target position, e.g., mediated by NHEJ. In an embodiment, the first, second and third gRNAs are used to target one Cas9 nuclease and two Cas9 nickases to flank, e.g., the first gRNA that will be used with the Cas9 nuclease is used to target upstream of (e.g., within 400 bp upstream of the Alu repeat, or within 40 bp upstream of the LCA10 target position) or downstream of (e.g., within 700 bp downstream) of the LCA10 target position, and the second and third gRNAs that will be used with the Cas9 nickase pair are used to target the opposite side of the LCA10 target position (e.g., within 400 bp upstream of the Alu repeat, within 40 bp upstream of the LCA10 target position, or within 700 bp downstream of the LCA10 target position) in the CEP290 gene.

[0877] In an embodiment, when four gRNAs (e.g., two pairs) are used to target four Cas9 nickases to create four single strand breaks to delete genomic sequence including the mutation at the LCA10 target position, e.g., mediated by NHEJ, the first pair and second pair of gRNAs are used to target four Cas9 nickases to flank, e.g., the first pair of gRNAs are used to target upstream of (e.g., within 400 bp upstream of the Alu repeat, or within 40 bp upstream of the LCA10 target position), and the second pair of gRNAs are used to target downstream of (e.g., within 700 bp downstream of the LCA10 target position) in the CEP290 gene.

[0878] In an embodiment, dual targeting is utilized to delete genomic sequence including the mutation at the LCA10 target position mediated by NHEJ. It is contemplated herein that in an embodiment any upstream gRNA (e.g., within 400 bp upstream of an Alu repeat, or within 40 bp upstream of the LCA10 target position) in Tables 2A-2C and Tables 4A-4D can be paired with any downstream gRNA (e.g., within 700 downstream of LCA10 target position) in Tables 4A-4D to be used with a S. pyogenes Cas9 molecule to generate dual targeting. Exemplary pairs including selecting a targeting domain that is labeled as upstream from Tables 2A-2C or Tables 4A-4D and a second targeting domain that is labeled as downstream from Tables 4A-4D. In an embodiment, a targeting domain that is labeled as upstream in Tables 2A-2C or Tables 4A-4D can be combined with any of the targeting domains that is labeled as downstream in Tables 4A-4D.

[0879] In an embodiment, dual targeting is utilized to delete genomic sequence including the mutation at the LCA10 target position mediated by NHEJ. It is contemplated herein that in an embodiment any upstream gRNA (e.g., within 400 bp upstream of an Alu repeat, or within 40 bp upstream of the LCA10 target position) in Tables 3A-3C and Tables 5A-5D can be paired with any downstream gRNA (e.g., within 700 downstream of LCA10 target position) in Tables 5A-5D to be used with a S. aureus Cas9 molecule to generate dual targeting. Exemplary pairs include selecting a targeting domain that is labeled as upstream from Tables 3A-3C or Tables 5A-5D and a second targeting domain that is labeled as downstream from Tables 5A-5D. In an embodiment, a targeting domain that is labeled as upstream in Tables 3A-3C or Tables 5A-5D can be combined with any of the targeting domains that is labeled as downstream in Tables 5A-5D.

[0880] In an embodiment, dual targeting is utilized to delete genomic sequence including the mutation at the LCA10 target position mediated by NHEJ. It is contemplated herein that in an embodiment any upstream gRNA (e.g., within 400 bp upstream of an Alu repeat, or within 40 bp upstream of the LCA10 target position) in Tables 6A-6B can be paired with any downstream gRNA (e.g., within 700 downstream of LCA10 target position) in Tables 6A-6B to be used with a N. meningitidis Cas9 molecule to generate dual targeting. Exemplary pairs include selecting a targeting domain that is labeled as upstream from Tables 6A-6B and a second targeting domain that is labeled as downstream from Tables 6A-6B. In an embodiment, a targeting domain that is labeled as upstream in Tables 6A-6B can be combined with any of the targeting domains that is labeled as downstream in Tables 6A-6B.

[0881] In an embodiment, dual targeting (e.g., dual double strand cleavage) is used to create two double strand breaks to delete a genomic sequence including the mutation at the LCA10 target position, e.g., mediated by NHEJ. In an embodiment, the first and second gRNAs are used target two Cas9 nucleases to flank, e.g., the first of gRNA is used to target upstream of (e.g., within 1000 bp upstream of the Alu repeat, or within 40 bp upstream of the LCA10 target position), and the second gRNA is used to target downstream of (e.g., within 1000 bp downstream of the LCA10 target position) in the CEP290 gene.

[0882] In an embodiment, dual targeting (e.g., dual double strand cleavage) is used to create a double strand break and a pair of single strand breaks to delete a genomic sequence including the mutation at the LCA10 target position, e.g., mediated by NHEJ. In an embodiment, the first, second and third gRNAs are used to target one Cas9 nuclease and two Cas9 nickases to flank, e.g., the first gRNA that will be used with the Cas9 nuclease is used to target upstream of (e.g., within 1000 bp upstream of the Alu repeat, or within 40 bp upstream of the LCA10 target position) or downstream of (e.g., within 1000 bp downstream) of the LCA10 target position, and the second and third gRNAs that will be used with the Cas9 nickase pair are used to target the opposite side of the LCA10 target position (e.g., within 1000 bp upstream of the Alu repeat, or within 40 bp upstream of the LCA10 target position or within 1000 bp downstream of the LCA10 target position) in the CEP290 gene.

[0883] In an embodiment, when four gRNAs (e.g., two pairs) are used to target four Cas9 nickases to create four single strand breaks to delete genomic sequence including the mutation at the LCA10 target position, e.g., mediated by NHEJ, the first pair and second pair of gRNAs are used to target four Cas9 nickases to flank, e.g., the first pair of gRNAs are used to target upstream of (e.g., within 1000 bp upstream of the Alu repeat, or within 40 bp upstream of the LCA10 target position), and the second pair of gRNAs are used to target downstream of (e.g., within 1000 bp downstream of the LCA10 target position) in the CEP290 gene.

[0884] In an embodiment, dual targeting is utilized to delete genomic sequence including the mutation at the LCA10 target position, e.g., mediated by NHEJ. It is contemplated herein that in an embodiment any upstream gRNA (e.g., within 1000 bp upstream of an Alu repeat, or within 40 bp upstream of the LCA10 target position) in Tables 2A-2C, Tables 4A-4D, or Tables 8A-8D can be paired with any downstream gRNA (e.g., within 1000 downstream of LCA10 target position) in Tables 2A-2C, Tables 4A-4D, or Tables 8A-8D to be used with a S. pyogenes Cas9 molecule to generate dual targeting. Exemplary pairs including selecting a targeting domain that is labeled as upstream from Tables 2A-2C, Tables 4A-4D, or Tables 8A-8D and a second targeting domain that is labeled as downstream from Tables 2A-2C, Tables 4A-4D, or Tables 8A-8D. In an embodiment, a targeting domain that is labeled as upstream in Tables 2A-2C, Tables 4A-4D, or Tables 8A-8D can be combined with any of the targeting domains that is labeled as downstream in Tables 2A-2C, Tables 4A-4D, or Tables 8A-8D.

[0885] In an embodiment, dual targeting is utilized to delete genomic sequence including the mutation at the LCA10 target position mediated by NHEJ. It is contemplated herein that in an embodiment any upstream gRNA (e.g., within 1000 bp upstream of an Alu repeat, or within 40 bp upstream of the LCA10 target position) in Tables 3A-3C, Tables 5A-5D, Tables 7A-7D, or Tables 9A-9E can be paired with any downstream gRNA (e.g., within 1000 downstream of LCA10 target position) in Tables 3A-3C, Tables 5A-5D, Tables 7A-7D, or Tables 9A-9E to be used with a S. aureus Cas9 molecule to generate dual targeting. Exemplary pairs include selecting a targeting domain that is labeled as upstream from Tables 3A-3C, Tables 5A-5D, Tables 7A-7D, or Tables 9A-9E and a second targeting domain that is labeled as downstream from Tables 3A-3C, Tables 5A-5D, Tables 7A-7D, or Tables 9A-9E. In an embodiment, a targeting domain that is labeled as upstream in Tables 3A-3C, Tables 5A-5D, Tables 7A-7D, or Tables 9A-9E can be combined with any of the targeting domains that is labeled as downstream in Tables 3A-3C, Tables 5A-5D, Tables 7A-7D, or Tables 9A-9E.

[0886] In an embodiment, dual targeting is utilized to delete genomic sequence including the mutation at the LCA10 target position, e.g., mediated by NHEJ. It is contemplated herein that in an embodiment any upstream gRNA (e.g., within 1000 bp upstream of an Alu repeat, or within 40 bp upstream of the LCA10 target position) in Tables 6A-6B or Tables 10A-10B can be paired with any downstream gRNA (e.g., within 1000 downstream of LCA10 target position) in Tables 6A-6D to be used with a N. meningitidis Cas9 molecule to generate dual targeting. Exemplary pairs include selecting a targeting domain that is labeled as upstream from Tables 6A-6B or Tables 10A-10B and a second targeting domain that is labeled as downstream from Tables 6A-6B or Tables 10A-10B. In an embodiment, a targeting domain that is labeled as upstream in Tables 6A-6B or Tables 10A-10B and can be combined with any of the targeting domains that is labeled as downstream in Tables 6A-6B or Tables 10A-10B.

[0887] Any of the targeting domains in the tables described herein can be used with a Cas9 nickase molecule to generate a single strand break.

[0888] Any of the targeting domains in the tables described herein can be used with a Cas9 nuclease molecule to generate a double strand break.

[0889] In an embodiment, dual targeting (e.g., dual nicking) is used to create two nicks on opposite DNA strands by using S. pyogenes, S. aureus and N. meningitidis Cas9 nickases with two targeting domains that are complementary to opposite DNA strands, e.g., a gRNA comprising any minus strand targeting domain may be paired any gRNA comprising a plus strand targeting domain provided that the two gRNAs are oriented on the DNA such that PAMs face outward and the distance between the 5′ ends of the gRNAs is 0-50 bp. Exemplary nickase pairs including selecting a targeting domain from Group A and a second targeting domain from Group B in Table 2D (for S. pyogenes), or selecting a targeting domain from Group A and a second targeting domain from Group B in Table 7D (for S. aureus). It is contemplated herein that in an embodiment a targeting domain of Group A can be combined with any of the targeting domains of Group B in Table 2D (for S. pyogenes). For example, CEP290-B5 or CEP290-B10 can be combined with CEP290-B1 or CEP290-B6. It is contemplated herein that in an embodiment a targeting domain of Group A can be combined with any of the targeting domains of Group B in Table 7D (for S. aureus). For example, CEP290-12 or CEP290-17 can be combined with CEP290-11 or CEP290-16.

[0890] In an embodiment, dual targeting (e.g., dual double strand cleavage) is used to create two double strand breaks by using S. pyogenes, S. aureus and N. meningitidis Cas9 nucleases with two targeting domains. It is contemplated herein that in an embodiment any upstream gRNA of any of Tables 2A-2C, Tables 3A-3C, Tables 4A-4D, Tables 5A-5D, Tables 6A-6B, Tables 7A-7C, Tables 8A-8D, Tables 9A-9E, or Tables 10A-10B can be paired with any downstream gRNA of any of Tables 2A-2C, Tables 3A-3C, Tables 4A-4D, Tables 5A-5D, Tables 6A-6B, Tables 7A-7C, Tables 8A-8D, Tables 9A-9E, or Tables 10A-10B. Exemplary nucleases pairs are shown in Table 11, e.g., CEP290-323 can be combined with CEP290-11, CEP290-323 can be combined with CEP290-64, CEP290-490 can be combined with CEP290-496, CEP290-490 can be combined with CEP290-502, CEP290-490 can be combined with CEP290-504, CEP290-492 can be combined with CEP290-502, or CEP290-492 can be combined with CEP290-504.

[0891] It is contemplated herein that any upstream gRNA described herein may be paired with any downstream gRNA described herein. When an upstream gRNA designed for use with one species of Cas9 is paired with a downstream gRNA designed for use from a different species of Cas9, both Cas9 species are used to generate a single or double-strand break, as desired.

### Exemplary Targeting Domains

[0892] Table 2A provides targeting domains for NHEJ-mediated introduction of an indel in close proximity to or including the LCA10 target position in the CEP290 gene selected according to the first tier parameters. The targeting domains are within 40 bases of the LCA10 target position, have good orthogonality, and start with G. It is contemplated herein that the targeting domain hybridizes to the target domain through complementary base pairing. Any of the targeting domains in the table can be used with a S. pyogenes Cas9 molecule that generates a double stranded break (Cas9 nuclease) or a single-stranded break (Cas9 nickase).

TABLE 2A

| | | | Target | Position |
|---|---|---|---|---|
| gRNA | DNA | Targeting | Site | relative |
| Name | Strand | Domain | Length | to mutation |
| CEP290-B4 | + | GAGAUACUCACAAUUACAAC | 20 | upstream |
| | | (SEQ ID NO: 395) | | |
| CEP290-B28 | + | GAUACUCACAAUUACAACUG | 20 | upstream |
| | | (SEQ ID NO: 396) | | |

[0893] Table 2B provides targeting domains for NHEJ-mediated introduction of an indel in close proximity to or including the LCA10 target position in the CEP290 gene selected according to the second tier parameters. The targeting domains are within 40 bases of the LCA10 target position, have good orthogonality, and do not start with G. It is contemplated herein that the targeting domain hybridizes to the target domain through complementary base pairing. Any of the targeting domains in the table can be used with a S. pyogenes Cas9 molecule that generates a double stranded break (Cas9 nuclease) or a single-stranded break (Cas9 nickase).

TABLE 2B

| | | | Target | Position |
|---|---|---|---|---|
| | DNA | | Site | relative to |
| gRNA Name | Strand | Targeting Domain | Length | mutation |
| CEP290-B6 | − | CUCAUACCUAUCCCUAU | 17 | downstream |
| | | (SEQ ID NO: 594) | | |
| CEP290-B20 | + | ACACUGCCAAUAGGGAU | 17 | downstream |
| | | (SEQ ID NO: 595) | | |
| CEP290-B10 | + | CAAUUACAACUGGGGCC | 17 | upstream |
| | | (SEQ ID NO: 596) | | |
| CEP290-B21 | + | CUAAGACACUGCCAAUA | 17 | downstream |
| | | (SEQ ID NO: 597) | | |
| CEP290-B9 | + | AUACUCACAAUUACAAC | 17 | upstream |
| | | (SEQ ID NO: 598) | | |
| CEP290-B1 | − | UAUCUCAUACCUAUCCCUAU | 20 | downstream |
| | | (SEQ ID NO: 599) | | |
| CEP290-B29 | + | AAGACACUGCCAAUAGGGAU | 20 | downstream |
| | | (SEQ ID NO: 600) | | |
| CEP290-B5 | + | UCACAAUUACAACUGGGGCC | 20 | upstream |
| | | (SEQ ID NO: 601) | | |
| CEP290-B30 | + | AGAUACUCACAAUUACAACU | 20 | upstream |
| | | (SEQ ID NO: 602) | | |

[0894] Table 2C provides targeting domains for NHEJ-mediated introduction of an indel in close proximity to or including the LCA10 target position in the CEP290 gene selected according to the fourth tier parameters. The targeting domains are within 40 bases of the LCA10 target position and do not start with G. It is contemplated herein that the targeting domain hybridizes to the target domain through complementary base pairing. Any of the targeting domains in the table can be used with a S. pyogenes Cas9 molecule that generates a double stranded break (Cas9 nuclease) or a single-stranded break (Cas9 nickase).

TABLE 2C

| | | | Target | Position |
|---|---|---|---|---|
| | DNA | | Site | relative to |
| gRNA Name | Strand | Targeting Domain | Length | mutation |
| CEP290-B22 | + | ACUAAGACACUGCCAAU (SEQ | 17 | downstream |
| | | ID NO: 603) | | |
| CEP290-B23 | + | UACUCACAAUUACAACU (SEQ | 17 | upstream |
| | | ID NO: 604) | | |
| CEP290-B24 | + | ACUCACAAUUACAACUG (SEQ | 17 | upstream |
| | | ID NO: 605) | | |
| CEP290-B25 | + | ACAACUGGGGCCAGGUG (SEQ | 17 | upstream |
| | | ID NO: 606) | | |
| CEP290-B26 | + | ACUGGGGCCAGGUGCGG (SEQ | 17 | upstream |
| | | ID NO: 607) | | |
| CEP290-B27 | − | AUGUGAGCCACCGCACC (SEQ | 17 | upstream |
| | | ID NO: 608) | | |
| CEP290-B31 | + | AAACUAAGACACUGCCAAUA | 20 | downstream |
| | | (SEQ ID NO: 609) | | |
| CEP290-B32 | + | AAAACUAAGACACUGCCAAU | 20 | upstream |
| | | (SEQ ID NO: 610) | | |
| CEP290-B33 | + | AUUACAACUGGGGCCAGGUG | 20 | upstream |
| | | (SEQ ID NO: 611) | | |
| CEP290-B34 | + | ACAACUGGGGCCAGGUGCGG | 20 | upstream |
| | | (SEQ ID NO: 612) | | |

[0895] Table 2D provides targeting domains for NHEJ-mediated introduction of an indel in close proximity to or including the LCA10 target position in the CEP290 gene that can be used for dual targeting. Any of the targeting domains in the table can be used with a S. pyogenes Cas9 (nickase) molecule to generate a single stranded break.

[0896] Exemplary nickase pairs including selecting a targeting domain from Group A and a second targeting domain from Group B. It is contemplated herein that a targeting domain of Group A can be combined with any of the targeting domains of Group B. For example, the CEP290-B5 or CEP290-B10 can be combined with CEP290-B1 or CEP290-B6.

TABLE 2D

| Group A | Group B |
|---|---|
| CEP290-B5 | CEP290-B1 |
| CEP290-B10 | CEP290-B6 |

[0897] Table 3A provides targeting domains for NHEJ-mediated introduction of an indel in close proximity to or including the LCA10 target position in the CEP290 gene selected according to the first tier parameters. The targeting domains are within 40 bases of the LCA10 target position, have good orthogonality, and start with G. It is contemplated herein that the targeting domain hybridizes to the target domain through complementary base pairing. Any of the targeting domains in the table can be used with a S. aureus Cas9 molecule that generates a double stranded break (Cas9 nuclease) or a single-stranded break (Cas9 nickase).

TABLE 3A

| | | | Target | Position |
|---|---|---|---|---|
| | DNA | | Site | relative |
| gRNA Name | Strand | Targeting Domain | Length | to mutation |
| CEP290-B1000 | + | GAGAUACUCACAAUUACAAC | 20 | upstream |
| | | (SEQ ID NO: 395) | | |
| CEP290-B1001 | + | GAUACUCACAAUUACAA | 17 | upstream |
| | | (SEQ ID NO: 397) | | |

[0898] Table 3B provides targeting domains for NHEJ-mediated introduction of an indel in close proximity to or including the LCA10 target position in the CEP290 gene selected according to the second tier parameters. The targeting domains are within 40 bases of the LCA10 target position, have good orthogonality, and do not start with G. It is contemplated herein that the targeting domain hybridizes to the target domain through complementary base pairing. Any of the targeting domains in the table can be used with a S. aureus Cas9 molecule that generates a double stranded break (Cas9 nuclease) or a single-stranded break (Cas9 nickase).

TABLE 3B

| | | | Target | Position |
|---|---|---|---|---|
| | DNA | | Site | relative |
| gRNA Name | Strand | Targeting Domain | Length | to mutation |
| CEP290-B1002 | + | CACUGCCAAUAGGGAUAGGU | 20 | downstream |
| | | (SEQ ID NO: 613) | | |
| CEP290-B1003 | + | UGCCAAUAGGGAUAGGU (SEQ | 17 | downstream |
| | | ID NO: 614) | | |
| CEP290-B1004 | + | UGAGAUACUCACAAUUACAA | 20 | upstream |
| | | (SEQ ID NO: 615) | | |
| CEP290-B1005 | + | AUACUCACAAUUACAAC (SEQ | 17 | upstream |
| | | ID NO: 598) | | |

[0899] Table 3C provides targeting domains for NHEJ-mediated introduction of an indel in close proximity to or including the LCA10 target position in the CEP290 gene selected according to the fourth tier parameters. The targeting domains are within 40 bases of the LCA10 target position, and do not start with G. It is contemplated herein that the targeting domain hybridizes to the target domain through complementary base pairing. Any of the targeting domains in the table can be used with a S. aureus Cas9 molecule that generates a double stranded break (Cas9 nuclease) or a single-stranded break (Cas9 nickase).

TABLE 3C

| | | | Target | Position |
|---|---|---|---|---|
| | DNA | | Site | relative |
| gRNA Name | Strand | Targeting Domain | Length | to mutation |
| CEP290-B1006 | − | ACCUGGCCCCAGUUGUAAUU | 20 | upstream |
| | | (SEQ ID NO: 616) | | |
| CEP290-B1007 | − | UGGCCCCAGUUGUAAUU | 17 | upstream |
| | | (SEQ ID NO: 617) | | |

[0900] Table 4A provides targeting domains for break-induced deletion of genomic sequence including the mutation at the LCA10 target position in the CEP290 gene selected according to the first tier parameters. The targeting domains are within 400 bp upstream of an Alu repeat or 700 bp downstream of the mutation, have good orthogonality, and start with G. It is contemplated herein that the targeting domain hybridizes to the target domain through complementary base pairing. Any of the targeting domains in the table can be used with a S. pyogenes Cas9 molecule that generates a double stranded break (Cas9 nuclease) or a single-stranded break (Cas9 nickase).

TABLE 4A

| | | | Target | Position |
|---|---|---|---|---|
| | DNA | | Site | relative |
| gRNA Name | Strand | Targeting Domain | Length | to mutation |
| CEP290-B8 | − | GCUACCGGUUACCUGAA | 17 | downstream |
| | | (SEQ ID NO: 457) | | |
| CEP290-B217 | + | GCAGAACUAGUGUAGAC | 17 | downstream |
| | | (SEQ ID NO: 458) | | |
| CEP290-B69 | − | GUUGAGUAUCUCCUGUU | 17 | downstream |
| | | (SEQ ID NO: 459) | | |
| CEP290-B115 | + | GAUGCAGAACUAGUGUAGAC | 20 | downstream |
| | | (SEQ ID NO: 460) | | |
| CEP290-B187 | + | GCUUGAACUCUGUGCCAAAC | 20 | downstream |
| | | (SEQ ID NO: 461) | | |

[0901] Table 4B provides targeting domains for break-induced deletion of genomic sequence including the mutation at the LCA10 target position in the CEP290 gene selected according to the second tier parameters. The targeting domains are within 400 bp upstream of an Alu repeat or 700 bp downstream of the mutation, have good orthogonality, and do not start with G. It is contemplated herein that the targeting domain hybridizes to the target domain through complementary base pairing. Any of the targeting domains in the table can be used with a S. pyogenes Cas9 molecule that generates a double stranded break (Cas9 nuclease) or a single-stranded break (Cas9 nickase).

TABLE 4B

| | | | Target | Position |
|---|---|---|---|---|
| | DNA | | Site | relative to |
| gRNA Name | Strand | Targeting Domain | Length | mutation |
| CEP290-B269 | − | AGCUACCGGUUACCUGA | 17 | downstream |
| | | (SEQ ID NO: 618) | | |
| CEP290-B285 | + | UUUAAGGCGGGGAGUCACAU | 20 | downstream |
| | | (SEQ ID NO: 619) | | |
| CEP290-B3 | − | AAAGCUACCGGUUACCUGAA | 20 | downstream |
| | | (SEQ ID NO: 620) | | |
| CEP290-B207 | − | AAAAGCUACCGGUUACCUGA | 20 | downstream |
| | | (SEQ ID NO: 621) | | |
| CEP290-B106 | − | CUCAUACCUAUCCCUAU | 17 | downstream |
| | | (SEQ ID NO: 594) | | |
| CEP290-B55 | + | ACACUGCCAAUAGGGAU | 17 | downstream |
| | | (SEQ ID NO: 595) | | |
| CEP290-B138 | − | UAUCUCAUACCUAUCCCUAU | 20 | downstream |
| | | (SEQ ID NO: 599) | | |
| CEP290-B62 | − | ACGUGCUCUUUUCUAUAUAU | 20 | downstream |
| | | (SEQ ID NO: 622) | | |
| CEP290-B121 | + | AUUUGACACCACAUGCACUG | 20 | downstream |
| | | (SEQ ID NO: 623) | | |
| CEP290-B120 | − | CGUGCUCUUUUCUAUAUAUA | 20 | downstream |
| | | (SEQ ID NO: 624) | | |
| CEP290-B36 | − | UGGUGUCAAAUAUGGUGCUU | 20 | downstream |
| | | (SEQ ID NO: 625) | | |
| CEP290-B236 | + | ACUUUUACCCUUCAGGUAAC | 20 | downstream |
| | | (SEQ ID NO: 626) | | |
| CEP290-B70 | − | AGUGCAUGUGGUGUCAAAUA | 20 | downstream |
| | | (SEQ ID NO: 627) | | |
| CEP290-B177 | − | UACAUGAGAGUGAUUAGUGG | 20 | downstream |
| | | (SEQ ID NO: 628) | | |
| CEP290-B451 | − | CGUUGUUCUGAGUAGCUUUC | 20 | upstream |
| | | (SEQ ID NO: 629) | | |
| CEP290-B452 | + | CCACAAGAUGUCUCUUGCCU | 20 | upstream |
| | | (SEQ ID NO: 630) | | |
| CEP290-B453 | − | CCUAGGCAAGAGACAUCUUG | 20 | upstream |
| | | (SEQ ID NO: 631) | | |
| CEP290-B454 | + | UGCCUAGGACUUUCUAAUGC | 20 | upstream |
| | | (SEQ ID NO: 632) | | |
| CEP290-B498 | − | CGUUGUUCUGAGUAGCUUUC | 20 | upstream |
| | | (SEQ ID NO: 629) | | |
| CEP290-B523 | − | AUUAGCUCAAAAGCUUUUGC | 20 | upstream |
| | | (SEQ ID NO: 633) | | |

[0902] Table 4C provides targeting domains for break-induced deletion of genomic sequence including the mutation at the LCA10 target position in the CEP290 gene selected according to the third tier parameters. The targeting domains are within 400 bp upstream of an Alu repeat or 700 bp downstream of the mutation, and start with G. It is contemplated herein that the targeting domain hybridizes to the target domain through complementary base pairing. Any of the targeting domains in the table can be used with a S. pyogenes Cas9 molecule that generates a double stranded break (Cas9 nuclease) or a single-stranded break (Cas9 nickase).

TABLE 4C

| | | | Target | Position |
|---|---|---|---|---|
| | DNA | | Site | relative to |
| gRNA Name | Strand | Targeting Domain | Length | mutation |
| CEP290-B87 | − | GCAUGUGGUGUCAAAUA | 17 | downstream |
| | | (SEQ ID NO: 479) | | |
| CEP290-B50 | + | GAUGACAUGAGGUAAGU | 17 | downstream |
| | | (SEQ ID NO: 478) | | |
| CEP290-B260 | + | GUCACAUGGGAGUCACA | 17 | downstream |
| | | (SEQ ID NO: 500) | | |
| CEP290-B283 | − | GAGAGCCACAGUGCAUG | 17 | downstream |
| | | (SEQ ID NO: 472) | | |
| CEP290-B85 | − | GCUCUUUUCUAUAUAUA | 17 | downstream |
| | | (SEQ ID NO: 481) | | |
| CEP290-B78 | + | GCUUUUGACAGUUUUUA | 17 | downstream |
| | | (SEQ ID NO: 634) | | |
| CEP290-B292 | + | GAUAGAGACAGGAAUAA | 17 | downstream |
| | | (SEQ ID NO: 476) | | |
| CEP290-B278 | + | GGACUUGACUUUUACCCUUC | 20 | downstream |
| | | (SEQ ID NO: 485) | | |
| CEP290-B227 | + | GGGAGUCACAUGGGAGUCAC | 20 | downstream |
| | | (SEQ ID NO: 491) | | |
| CEP290-B261 | − | GUGGAGAGCCACAGUGCAUG | 20 | downstream |
| | | (SEQ ID NO: 501) | | |
| CEP290-B182 | + | GCCUGAACAAGUUUUGAAAC | 20 | downstream |
| | | (SEQ ID NO: 480) | | |
| CEP290-B67 | + | GGAGUCACAUGGGAGUCACA | 20 | downstream |
| | | (SEQ ID NO: 487) | | |
| CEP290-B216 | + | GUAAGACUGGAGAUAGAGAC | 20 | downstream |
| | | (SEQ ID NO: 497) | | |
| CEP290-B241 | + | GCUUUUGACAGUUUUUAAGG | 20 | downstream |
| | | (SEQ ID NO: 482) | | |
| CEP290-B161 | + | GUUUAGAAUGAUCAUUCUUG | 20 | downstream |
| | | (SEQ ID NO: 504) | | |
| CEP290-B259 | + | GUAGCUUUUGACAGUUUUUA | 20 | downstream |
| | | (SEQ ID NO: 499) | | |
| CEP290-B79 | + | GGAGAUAGAGACAGGAAUAA | 20 | downstream |
| | | (SEQ ID NO: 635) | | |
| CEP290-B436 | + | GUUCUGUCCUCAGUAAA | 17 | upstream |
| | | (SEQ ID NO: 503) | | |
| CEP290-B444 | + | GGAUAGGACAGAGGACA | 17 | upstream |
| | | (SEQ ID NO: 488) | | |
| CEP290-B445 | + | GAUGAAAAAUACUCUUU | 17 | upstream |
| | | (SEQ ID NO: 477) | | |
| CEP290-B459 | − | GAACUCUAUACCUUUUACUG | 20 | upstream |
| | | (SEQ ID NO: 466) | | |
| CEP290-B465 | + | GUAACAUAAUCACCUCUCUU | 20 | upstream |
| | | (SEQ ID NO: 496) | | |
| CEP290-B473 | + | GAAAGAUGAAAAAUACUCUU | 20 | upstream |
| | | (SEQ ID NO: 462) | | |
| CEP290-B528 | + | GUAACAUAAUCACCUCUCUU | 20 | upstream |
| | | (SEQ ID NO: 496) | | |

[0903] Table 4D provides targeting domains for break-induced deletion of genomic sequence including the mutation at the LCA10 target position in the CEP290 gene selected according to the fourth tier parameters. The targeting domains are within 400 bp upstream of an Alu repeat or 700 bp downstream of the mutation, and do not start with G. It is contemplated herein that the targeting domain hybridizes to the target domain through complementary base pairing. Any of the targeting domains in the table can be used with a S. pyogenes Cas9 molecule that generates a double stranded break (Cas9 nuclease) or a single-stranded break (Cas9 nickase).

TABLE 4D

| | | | Target | |
|---|---|---|---|---|
| | DNA | | Site | |
| gRNA Name | Strand | Targeting Domain | Length | |
| CEP290-B233 | + | AAGGCGGGGAGUCACAU | 17 | downstream |
| | | (SEQ ID NO: 636) | | |
| CEP290-B175 | + | UAAGGCGGGGAGUCACA | 17 | downstream |
| | | (SEQ ID NO: 637) | | |
| CEP290-B280 | + | UGAACUCUGUGCCAAAC | 17 | downstream |
| | | (SEQ ID NO: 638) | | |
| CEP290-B92 | + | CUAAGACACUGCCAAUA | 17 | downstream |
| | | (SEQ ID NO: 597) | | |
| CEP290-B268 | + | UUUACCCUUCAGGUAAC | 17 | downstream |
| | | (SEQ ID NO: 639) | | |
| CEP290-B154 | + | UGACACCACAUGCACUG | 17 | downstream |
| | | (SEQ ID NO: 640) | | |
| CEP290-B44 | + | ACUAAGACACUGCCAAU | 17 | downstream |
| | | (SEQ ID NO: 603) | | |
| CEP290-B231 | + | UUGCUCUAGAUGACAUG | 17 | downstream |
| | | (SEQ ID NO: 641) | | |
| CEP290-B242 | + | UGACAGUUUUUAAGGCG | 17 | downstream |
| | | (SEQ ID NO: 642) | | |
| CEP290-B226 | − | UGUCAAAUAUGGUGCUU | 17 | downstream |
| | | (SEQ ID NO: 643) | | |
| CEP290-B159 | + | AGUCACAUGGGAGUCAC | 17 | downstream |
| | | (SEQ ID NO: 644) | | |
| CEP290-B222 | − | AUGAGAGUGAUUAGUGG | 17 | downstream |
| | | (SEQ ID NO: 645) | | |
| CEP290-B274 | + | UGACAUGAGGUAAGUAG | 17 | downstream |
| | | (SEQ ID NO: 646) | | |
| CEP290-B68 | − | UACAUGAGAGUGAUUAG | 17 | downstream |
| | | (SEQ ID NO: 647) | | |
| CEP290-B212 | + | UAAGGAGGAUGUAAGAC | 17 | downstream |
| | | (SEQ ID NO: 648) | | |
| CEP290-B270 | + | CUUGACUUUUACCCUUC | 17 | downstream |
| | | (SEQ ID NO: 649) | | |
| CEP290-B96 | + | UCACUGAGCAAAACAAC | 17 | downstream |
| | | (SEQ ID NO: 650) | | |
| CEP290-B104 | + | AGACUUAUAUUCCAUUA | 17 | downstream |
| | | (SEQ ID NO: 651) | | |
| CEP290-B122 | + | CAUGGGAGUCACAGGGU | 17 | downstream |
| | | (SEQ ID NO: 652) | | |
| CEP290-B229 | + | UAGAAUGAUCAUUCUUG | 17 | downstream |
| | | (SEQ ID NO: 653) | | |
| CEP290-B99 | + | UUGACAGUUUUUAAGGC | 17 | downstream |
| | | (SEQ ID NO: 654) | | |
| CEP290-B7 | − | AAACUGUCAAAAGCUAC | 17 | downstream |
| | | (SEQ ID NO: 655) | | |
| CEP290-B41 | + | UCAUUCUUGUGGCAGUA | 17 | downstream |
| | | (SEQ ID NO: 2780) | | |
| CEP290-B37 | + | AUGACAUGAGGUAAGUA | 17 | downstream |
| | | (SEQ ID NO: 656) | | |
| CEP290-B97 | − | UGUUUCAAAACUUGUUC | 17 | downstream |
| | | (SEQ ID NO: 657) | | |
| CEP290-B173 | − | AUAUCUGUCUUCCUUAA | 17 | downstream |
| | | (SEQ ID NO: 658) | | |
| CEP290-B136 | + | UGAACAAGUUUUGAAAC | 17 | downstream |
| | | (SEQ ID NO: 659) | | |
| CEP290-B71 | − | UUCUGCAUCUUAUACAU | 17 | downstream |
| | | (SEQ ID NO: 660) | | |
| CEP290-B172 | − | AUAAGUCUUUUGAUAUA | 17 | downstream |
| | | (SEQ ID NO: 661) | | |
| CEP290-B238 | + | UUUGACAGUUUUUAAGG | 17 | downstream |
| | | (SEQ ID NO: 662) | | |
| CEP290-B148 | − | UGCUCUUUUCUAUAUAU | 17 | downstream |
| | | (SEQ ID NO: 663) | | |
| CEP290-B208 | + | AGACUGGAGAUAGAGAC | 17 | downstream |
| | | (SEQ ID NO: 664) | | |
| CEP290-B53 | + | CAUAAGAAAGAACACUG | 17 | downstream |
| | | (SEQ ID NO: 665) | | |
| CEP290-B166 | + | UUCUUGUGGCAGUAAGG | 17 | downstream |
| | | (SEQ ID NO: 666) | | |
| CEP290-B247 | − | AAGCAUACUUUUUUUAA | 17 | downstream |
| | | (SEQ ID NO: 667) | | |
| CEP290-B245 | + | CAACUGGAAGAGAGAAA | 17 | downstream |
| | | (SEQ ID NO: 668) | | |
| CEP290-B167 | + | UAUGCUUAAGAAAAAAA | 17 | downstream |
| | | (SEQ ID NO: 669) | | |
| CEP290-B171 | − | UUUUAUUAUCUUUAUUG | 17 | downstream |
| | | (SEQ ID NO: 670) | | |
| CEP290-B140 | + | CUAGAUGACAUGAGGUAAGU | 20 | downstream |
| | | (SEQ ID NO: 671) | | |
| CEP290-B147 | + | UUUUAAGGCGGGGAGUCACA | 20 | downstream |
| | | (SEQ ID NO: 672) | | |
| CEP290-B253 | + | AAGACACUGCCAAUAGGGAU | 20 | downstream |
| | | (SEQ ID NO: 600) | | |
| CEP290-B73 | − | UCCUGUUUCAAAACUUGUUC | 20 | downstream |
| | | (SEQ ID NO: 673) | | |
| CEP290-B206 | − | UGUGUUGAGUAUCUCCUGUU | 20 | downstream |
| | | (SEQ ID NO: 674) | | |
| CEP290-B57 | + | CUCUUGCUCUAGAUGACAUG | 20 | downstream |
| | | (SEQ ID NO: 675) | | |
| CEP290-B82 | + | CAGUAAGGAGGAUGUAAGAC | 20 | downstream |
| | | (SEQ ID NO: 676) | | |
| CEP290-B265 | + | AGAUGACAUGAGGUAAGUAG | 20 | downstream |
| | | (SEQ ID NO: 677) | | |
| CEP290-B105 | + | AAUUCACUGAGCAAAACAAC | 20 | downstream |
| | | (SEQ ID NO: 678) | | |
| CEP290-B239 | + | UCACAUGGGAGUCACAGGGU | 20 | downstream |
| | | (SEQ ID NO: 679) | | |
| CEP290-B180 | + | UAGAUGACAUGAGGUAAGUA | 20 | downstream |
| | | (SEQ ID NO: 680) | | |
| CEP290-B103 | + | UUUUGACAGUUUUUAAGGCG | 20 | downstream |
| | | (SEQ ID NO: 681) | | |
| CEP290-B254 | − | UAAUACAUGAGAGUGAUUAG | 20 | downstream |
| | | (SEQ ID NO: 682) | | |
| CEP290-B134 | − | UAGUUCUGCAUCUUAUACAU | 20 | downstream |
| | | (SEQ ID NO: 683) | | |
| CEP290-B151 | + | AAACUAAGACACUGCCAAUA | 20 | downstream |
| | | (SEQ ID NO: 609) | | |
| CEP290-B196 | + | AAAACUAAGACACUGCCAAU | 20 | downstream |
| | | (SEQ ID NO: 610) | | |
| CEP290-B2 | − | UAAAAACUGUCAAAAGCUAC | 20 | downstream |
| | | (SEQ ID NO: 506) | | |
| CEP290-B240 | + | CUUUUGACAGUUUUUAAGGC | 20 | downstream |
| | | (SEQ ID NO: 684) | | |
| CEP290-B116 | + | AAAAGACUUAUAUUCCAUUA | 20 | downstream |
| | | (SEQ ID NO: 685) | | |
| CEP290-B39 | + | AUACAUAAGAAAGAACACUG | 20 | downstream |
| | | (SEQ ID NO: 686) | | |
| CEP290-B91 | − | AAUAUAAGUCUUUUGAUAUA | 20 | downstream |
| | | (SEQ ID NO: 687) | | |
| CEP290-B126 | + | UGAUCAUUCUUGUGGCAGUA | 20 | downstream |
| | | (SEQ ID NO: 688) | | |
| CEP290-B202 | − | UACAUAUCUGUCUUCCUUAA | 20 | downstream |
| | | (SEQ ID NO: 689) | | |
| CEP290-B152 | − | CUUAAGCAUACUUUUUUUAA | 20 | downstream |
| | | (SEQ ID NO: 690) | | |
| CEP290-B77 | + | AAACAACUGGAAGAGAGAAA | 20 | downstream |
| | | (SEQ ID NO: 691) | | |
| CEP290-B145 | + | UCAUUCUUGUGGCAGUAAGG | 20 | downstream |
| | | (SEQ ID NO: 692) | | |
| CEP290-B72 | + | AAGUAUGCUUAAGAAAAAAA | 20 | downstream |
| | | (SEQ ID NO: 693) | | |
| CEP290-B221 | − | AUUUUUUAUUAUCUUUAUUG | 20 | downstream |
| | | (SEQ ID NO: 694) | | |
| CEP290-B424 | + | CUAGGACUUUCUAAUGC | 17 | upstream |
| | | (SEQ ID NO: 695) | | |
| CEP290-B425 | − | AUCUAAGAUCCUUUCAC | 17 | upstream |
| | | (SEQ ID NO: 696) | | |
| CEP290-B426 | + | UUAUCACCACACUAAAU | 17 | upstream |
| | | (SEQ ID NO: 697) | | |
| CEP290-B427 | − | AGCUCAAAAGCUUUUGC | 17 | upstream |
| | | (SEQ ID NO: 698) | | |
| CEP290-B428 | − | UGUUCUGAGUAGCUUUC | 17 | upstream |
| | | (SEQ ID NO: 699) | | |
| CEP290-B429 | + | ACUUUCUAAUGCUGGAG | 17 | upstream |
| | | (SEQ ID NO: 700) | | |
| CEP290-B430 | − | CUCUAUACCUUUUACUG | 17 | upstream |
| | | (SEQ ID NO: 701) | | |
| CEP290-B431 | + | CAAGAUGUCUCUUGCCU | 17 | upstream |
| | | (SEQ ID NO: 702) | | |
| CEP290-B432 | − | AUUAUGCCUAUUUAGUG | 17 | upstream |
| | | (SEQ ID NO: 703) | | |
| CEP290-B433 | + | AUGACUCAUAAUUUAGU | 17 | upstream |
| | | (SEQ ID NO: 704) | | |
| CEP290-B434 | − | UAGAGGCUUAUGGAUUU | 17 | upstream |
| | | (SEQ ID NO: 705) | | |
| CEP290-B435 | + | UAUUCUACUCCUGUGAA | 17 | upstream |
| | | (SEQ ID NO: 706) | | |
| CEP290-B437 | + | CUAAUGCUGGAGAGGAU | 17 | upstream |
| | | (SEQ ID NO: 707) | | |
| CEP290-B438 | − | AGGCAAGAGACAUCUUG | 17 | upstream |
| | | (SEQ ID NO: 708) | | |
| CEP290-B439 | + | AGCCUCUAUUUCUGAUG | 17 | upstream |
| | | (SEQ ID NO: 709) | | |
| CEP290-B440 | − | CAGCAUUAGAAAGUCCU | 17 | upstream |
| | | (SEQ ID NO: 710) | | |
| CEP290-B441 | − | CUGCUUUUGCCAAAGAG | 17 | upstream |
| | | (SEQ ID NO: 711) | | |
| CEP290-B442 | + | ACAUAAUCACCUCUCUU | 17 | upstream |
| | | (SEQ ID NO: 712) | | |
| CEP290-B443 | − | UCAGAAAUAGAGGCUUA | 17 | upstream |
| | | (SEQ ID NO: 713) | | |
| CEP290-B446 | − | UUCCUCAUCAGAAAUAG | 17 | upstream |
| | | (SEQ ID NO: 714) | | |
| CEP290-B447 | + | ACAGAGGACAUGGAGAA | 17 | upstream |
| | | (SEQ ID NO: 715) | | |
| CEP290-B448 | + | UGGAGAGGAUAGGACAG | 17 | upstream |
| | | (SEQ ID NO: 716) | | |
| CEP290-B449 | + | AGGAAGAUGAACAAAUC | 17 | upstream |
| | | (SEQ ID NO: 717) | | |
| CEP290-B450 | + | AGAUGAAAAAUACUCUU | 17 | upstream |
| | | (SEQ ID NO: 718) | | |
| CEP290-B455 | + | AGGACUUUCUAAUGCUGGAG | 20 | upstream |
| | | (SEQ ID NO: 719) | | |
| CEP290-B456 | − | AUUAGCUCAAAAGCUUUUGC | 20 | upstream |
| | | (SEQ ID NO: 633) | | |
| CEP290-B457 | − | CUCCAGCAUUAGAAAGUCCU | 20 | upstream |
| | | (SEQ ID NO: 720) | | |
| CEP290-B458 | + | AACAUGACUCAUAAUUUAGU | 20 | upstream |
| | | (SEQ ID NO: 721) | | |
| CEP290-B460 | − | AUCUUCCUCAUCAGAAAUAG | 20 | upstream |
| | | (SEQ ID NO: 722) | | |
| CEP290-B461 | + | AUAAGCCUCUAUUUCUGAUG | 20 | upstream |
| | | (SEQ ID NO: 723) | | |
| CEP290-B462 | + | UCUUAUUCUACUCCUGUGAA | 20 | upstream |
| | | (SEQ ID NO: 724) | | |
| CEP290-B463 | − | CUGCUGCUUUUGCCAAAGAG | 20 | upstream |
| | | (SEQ ID NO: 725) | | |
| CEP290-B464 | + | UUUCUAAUGCUGGAGAGGAU | 20 | upstream |
| | | (SEQ ID NO: 726) | | |
| CEP290-B466 | + | AAAUUAUCACCACACUAAAU | 20 | upstream |
| | | (SEQ ID NO: 727) | | |
| CEP290-B467 | + | CUUGUUCUGUCCUCAGUAAA | 20 | upstream |
| | | (SEQ ID NO: 728) | | |
| CEP290-B468 | − | AAAAUUAUGCCUAUUUAGUG | 20 | upstream |
| | | (SEQ ID NO: 729) | | |
| CEP290-B469 | − | UCAUCAGAAAUAGAGGCUUA | 20 | upstream |
| | | (SEQ ID NO: 730) | | |
| CEP290-B470 | − | AAAUAGAGGCUUAUGGAUUU | 20 | upstream |
| | | (SEQ ID NO: 731) | | |
| CEP290-B471 | + | UGCUGGAGAGGAUAGGACAG | 20 | upstream |
| | | (SEQ ID NO: 732) | | |
| CEP290-B472 | + | AUGAGGAAGAUGAACAAAUC | 20 | upstream |
| | | (SEQ ID NO: 733) | | |
| CEP290-B474 | − | CUUAUCUAAGAUCCUUUCAC | 20 | upstream |
| | | (SEQ ID NO: 734) | | |
| CEP290-B475 | + | AGAGGAUAGGACAGAGGACA | 20 | upstream |
| | | (SEQ ID NO: 735) | | |
| CEP290-B476 | + | AGGACAGAGGACAUGGAGAA | 20 | upstream |
| | | (SEQ ID NO: 736) | | |
| CEP290-B477 | + | AAAGAUGAAAAAUACUCUUU | 20 | upstream |
| | | (SEQ ID NO: 737) | | |
| CEP290-B495 | − | AGCUCAAAAGCUUUUGC | 17 | upstream |
| | | (SEQ ID NO: 698) | | |
| CEP290-B529 | − | UGUUCUGAGUAGCUUUC | 17 | upstream |
| | | (SEQ ID NO: 699) | | |
| CEP290-B513 | + | AUGACUCAUAAUUUAGU | 17 | upstream |
| | | (SEQ ID NO: 704) | | |
| CEP290-B490 | + | UAUUCUACUCCUGUGAA | 17 | upstream |
| | | (SEQ ID NO: 706) | | |
| CEP290-B485 | − | CUGCUUUUGCCAAAGAG | 17 | upstream |
| | | (SEQ ID NO: 711) | | |
| CEP290-B492 | + | ACAUAAUCACCUCUCUU | 17 | upstream |
| | | (SEQ ID NO: 712) | | |
| CEP290-B506 | + | AACAUGACUCAUAAUUUAGU | 20 | upstream |
| | | (SEQ ID NO: 721) | | |
| CEP290-B500 | + | UCUUAUUCUACUCCUGUGAA | 20 | upstream |
| | | (SEQ ID NO: 724) | | |
| CEP290-B521 | − | CUGCUGCUUUUGCCAAAGAG | 20 | upstream |
| | | (SEQ ID NO: 725) | | |

[0904] Table 5A provides targeting domains for break-induced deletion of genomic sequence including the mutation at the LCA10 target position in the CEP290 gene selected according to the first tier parameters. The targeting domains are within 400 bp upstream of an Alu repeat or 700 bp downstream of the mutation, have good orthogonality, and start with G. It is contemplated herein that the targeting domain hybridizes to the target domain through complementary base pairing. Any of the targeting domains in the table can be used with a S. aureus Cas9 molecule that generates a double stranded break (Cas9 nuclease) or a single-stranded break (Cas9 nickase).

TABLE 5A

| | | | | Position |
|---|---|---|---|---|
| | | | Target | relative |
| gRNA | DNA | | Site | to |
| Name | Strand | Targeting Domain | Length | mutation |
| CEP290- | + | GAAUCCUGAAAGCUACU | 17 | upstream |
| B1008 | | (SEQ ID NO: 510) | | |

[0905] Table 5B provides targeting domains for break-induced deletion of genomic sequence including the mutation at the LCA10 target position in the CEP290 gene selected according to the second tier parameters. The targeting domains are within 400 bp upstream of an Alu repeat or 700 bp downstream of the mutation, have good orthogonality, and do not start with G. It is contemplated herein that the targeting domain hybridizes to the target domain through complementary base pairing. Any of the targeting domains in the table can be used with a S. aureus Cas9 molecule that generates a double stranded break (Cas9 nuclease) or a single-stranded break (Cas9 nickase).

TABLE 5B

| | | | Target | Position |
|---|---|---|---|---|
| | DNA | | Site | relative to |
| gRNA Name | Strand | Targeting Domain | Length | mutation |
| CEP290-B1009 | − | CCUACUUACCUCAUGUCAUC | 20 | downstream |
| | | (SEQ ID NO: 747) | | |
| CEP290-B1010 | + | CUAUGAGCCAGCAAAAGCUU | 20 | upstream |
| | | (SEQ ID NO: 748) | | |
| CEP290-B1011 | − | ACGUUGUUCUGAGUAGCUUU | 20 | upstream |
| | | (SEQ ID NO: 749) | | |
| CEP290-B1012 | − | CAUAGAGACACAUUCAGUAA | 20 | upstream |
| | | (SEQ ID NO: 750) | | |
| CEP290-B1013 | − | ACUUACCUCAUGUCAUC | 17 | downstream |
| | | (SEQ ID NO: 751) | | |
| CEP290-B1014 | + | UGAGCCAGCAAAAGCUU | 17 | upstream |
| | | (SEQ ID NO: 752) | | |
| CEP290-B1015 | − | UUGUUCUGAGUAGCUUU | 17 | upstream |
| | | (SEQ ID NO: 753) | | |
| CEP290-B1016 | − | AGAGACACAUUCAGUAA | 17 | upstream |
| | | (SEQ ID NO: 754) | | |
| CEP290-B1017 | + | UUUAAGGCGGGGAGUCACAU | 20 | downstream |
| | | (SEQ ID NO: 619) | | |
| CEP290-B1018 | − | CAAAAGCUACCGGUUACCUG | 20 | downstream |
| | | (SEQ ID NO: 755) | | |
| CEP290-B1019 | + | UUUUAAGGCGGGGAGUCACA | 20 | downstream |
| | | (SEQ ID NO: 672) | | |
| CEP290-B1020 | − | UGUCAAAAGCUACCGGUUAC | 20 | downstream |
| | | (SEQ ID NO: 757) | | |
| CEP290-B1021 | + | AAGGCGGGGAGUCACAU | 17 | downstream |
| | | (SEQ ID NO: 636) | | |
| CEP290-B1022 | − | AAGCUACCGGUUACCUG | 17 | downstream |
| | | (SEQ ID NO: 758) | | |
| CEP290-B1023 | + | UAAGGCGGGGAGUCACA | 17 | downstream |
| | | (SEQ ID NO: 637) | | |
| CEP290-B1024 | − | CAAAAGCUACCGGUUAC | 17 | downstream |
| | | (SEQ ID NO: 759) | | |
| CEP290-B1025 | + | UAGGAAUCCUGAAAGCUACU | 20 | upstream |
| | | (SEQ ID NO: 760) | | |
| CEP290-B1026 | + | CAGAACAACGUUUUCAUUUA | 20 | upstream |
| | | (SEQ ID NO: 761) | | |
| CEP290-B1027 | − | CAAAAGCUUUUGCUGGCUCA | 20 | upstream |
| | | (SEQ ID NO: 762) | | |
| CEP290-B1028 | + | AGCAAAAGCUUUUGAGCUAA | 20 | upstream |
| | | (SEQ ID NO: 763) | | |
| CEP290-B1029 | + | AUCUUAUUCUACUCCUGUGA | 20 | upstream |
| | | (SEQ ID NO: 764) | | |
| CEP290-B1030 | + | AACAACGUUUUCAUUUA | 17 | upstream |
| | | (SEQ ID NO: 765) | | |
| CEP290-B1031 | − | AAGCUUUUGCUGGCUCA | 17 | upstream |
| | | (SEQ ID NO: 766) | | |
| CEP290-B1032 | + | AAAAGCUUUUGAGCUAA | 17 | upstream |
| | | (SEQ ID NO: 767) | | |
| CEP290-B1033 | + | UUAUUCUACUCCUGUGA | 17 | upstream |
| | | (SEQ ID NO: 768) | | |

[0906] Table 5C provides targeting domains for break-induced deletion of genomic sequence including the mutation at the LCA10 target position in the CEP290 gene selected according to the third tier parameters. The targeting domains are within 400 bp upstream of an Alu repeat or 700 bp downstream of the mutation, and start with G. It is contemplated herein that the targeting domain hybridizes to the target domain through complementary base pairing. Any of the targeting domains in the table can be used with a S. aureus Cas9 molecule that generates a double stranded break (Cas9 nuclease) or a single-stranded break (Cas9 nickase).

TABLE 5C

| | | | Target | Position |
|---|---|---|---|---|
| | DNA | | Site | relative to |
| gRNA Name | Strand | Targeting Domain | Length | mutation |
| CEP290-B1034 | + | GAAACAGGAAUAGAAAUUCA | 20 | downstream |
| | | (SEQ ID NO: 769) | | |
| CEP290-B1035 | + | GAAAGAUGAAAAAUACUCUU | 20 | upstream |
| | | (SEQ ID NO: 462) | | |
| CEP290-B1036 | − | GAAAUAGAGGCUUAUGGAUU | 20 | upstream |
| | | (SEQ ID NO: 547) | | |
| CEP290-B1037 | − | GAAUAUAAGUCUUUUGAUAU | 20 | downstream |
| | | (SEQ ID NO: 770) | | |
| CEP290-B1038 | + | GAGAAAUGGUUCCCUAUAUA | 20 | downstream |
| | | (SEQ ID NO: 771) | | |
| CEP290-B1039 | + | GAGAGGAUAGGACAGAGGAC | 20 | upstream |
| | | (SEQ ID NO: 772) | | |
| CEP290-B1040 | + | GAUGAGGAAGAUGAACAAAU | 20 | upstream |
| | | (SEQ ID NO: 773) | | |
| CEP290-B1041 | + | GAUGCAGAACUAGUGUAGAC | 20 | downstream |
| | | (SEQ ID NO: 460) | | |
| CEP290-B1042 | − | GAUUUGUUCAUCUUCCUCAU | 20 | upstream |
| | | (SEQ ID NO: 774) | | |
| CEP290-B1043 | + | GCAGUAAGGAGGAUGUAAGA | 20 | downstream |
| | | (SEQ ID NO: 775) | | |
| CEP290-B1044 | + | GCCUGAACAAGUUUUGAAAC | 20 | downstream |
| | | (SEQ ID NO: 480) | | |
| CEP290-B1045 | + | GCUUGAACUCUGUGCCAAAC | 20 | downstream |
| | | (SEQ ID NO: 461) | | |
| CEP290-B1046 | − | GCUUUCUGCUGCUUUUGCCA | 20 | upstream |
| | | (SEQ ID NO: 776) | | |
| CEP290-B1047 | − | GCUUUCUGCUGCUUUUGCCA | 20 | upstream |
| | | (SEQ ID NO: 776) | | |
| CEP290-B1048 | + | GCUUUUGACAGUUUUUAAGG | 20 | downstream |
| | | (SEQ ID NO: 482) | | |
| CEP290-B1049 | + | GGAAAGAUGAAAAAUACUCU | 20 | upstream |
| | | (SEQ ID NO: 778) | | |
| CEP290-B1050 | + | GGAGGAUGUAAGACUGGAGA | 20 | downstream |
| | | (SEQ ID NO: 779) | | |
| CEP290-B1051 | + | GGGGAGUCACAUGGGAGUCA | 20 | downstream |
| | | (SEQ ID NO: 573) | | |
| CEP290-B1052 | − | GGUGAUUAUGUUACUUUUUA | 20 | upstream |
| | | (SEQ ID NO: 780) | | |
| CEP290-B1053 | − | GGUGAUUAUGUUACUUUUUA | 20 | upstream |
| | | (SEQ ID NO: 780) | | |
| CEP290-B1054 | + | GUAAGACUGGAGAUAGAGAC | 20 | downstream |
| | | (SEQ ID NO: 497) | | |
| CEP290-B1055 | + | GUCACAUGGGAGUCACAGGG | 20 | downstream |
| | | (SEQ ID NO: 586) | | |
| CEP290-B1056 | − | GUGGUGUCAAAUAUGGUGCU | 20 | downstream |
| | | (SEQ ID NO: 782) | | |
| CEP290-B1057 | + | GAAAAAAAAGGUAAUGC | 17 | downstream |
| | | (SEQ ID NO: 783) | | |
| CEP290-B1058 | + | GAAAAGAGCACGUACAA | 17 | downstream |
| | | (SEQ ID NO: 784 | | |
| CEP290-B1059 | + | GAAUCCUGAAAGCUACU | 17 | upstream |
| | | (SEQ ID NO: 510) | | |
| CEP290-B1060 | − | GAAUGAUCAUUCUAAAC | 17 | downstream |
| | | (SEQ ID NO: 785) | | |
| CEP290-B1061 | + | GACAGAGGACAUGGAGA | 17 | upstream |
| | | (SEQ ID NO: 786) | | |
| CEP290-B1062 | + | GACUUUCUAAUGCUGGA | 17 | upstream |
| | | (SEQ ID NO: 787) | | |
| CEP290-B1063 | − | GAGAGUGAUUAGUGGUG | 17 | downstream |
| | | (SEQ ID NO: 788) | | |
| CEP290-B1064 | + | GAGCAAAACAACUGGAA | 17 | downstream |
| | | (SEQ ID NO: 789) | | |
| CEP290-B1065 | + | GAGGAAGAUGAACAAAU | 17 | upstream |
| | | (SEQ ID NO: 790) | | |
| CEP290-B1066 | + | GAGUCACAUGGGAGUCA | 17 | downstream |
| | | (SEQ ID NO: 791) | | |
| CEP290-B1067 | + | GAUCUUAUUCUACUCCU | 17 | upstream |
| | | (SEQ ID NO: 792) | | |
| CEP290-B1068 | + | GAUCUUAUUCUACUCCU | 17 | upstream |
| | | (SEQ ID NO: 792) | | |
| CEP290-B1069 | + | GAUGAAAAAUACUCUUU | 17 | upstream |
| | | (SEQ ID NO: 477) | | |
| CEP290-B1070 | + | GAUGACAUGAGGUAAGU | 17 | downstream |
| | | (SEQ ID NO: 478) | | |
| CEP290-B1071 | − | GAUUAUGUUACUUUUUA | 17 | upstream |
| | | (SEQ ID NO: 793) | | |
| CEP290-B1072 | − | GAUUAUGUUACUUUUUA | 17 | upstream |
| | | (SEQ ID NO: 793) | | |
| CEP290-B1073 | + | GCAAAACAACUGGAAGA | 17 | downstream |
| | | (SEQ ID NO: 794) | | |
| CEP290-B1074 | + | GCAGAACUAGUGUAGAC | 17 | downstream |
| | | (SEQ ID NO: 458) | | |
| CEP290-B1075 | − | GCUCUUUUCUAUAUAUA | 17 | downstream |
| | | (SEQ ID NO: 481) | | |
| CEP290-B1076 | + | GGAUAGGACAGAGGACA | 17 | upstream |
| | | (SEQ ID NO: 488) | | |
| CEP290-B1077 | + | GGAUGUAAGACUGGAGA | 17 | downstream |
| | | (SEQ ID NO: 795) | | |
| CEP290-B1078 | + | GUAAGGAGGAUGUAAGA | 17 | downstream |
| | | (SEQ ID NO: 796) | | |
| CEP290-B1079 | − | GUAUCUCCUGUUUGGCA | 17 | downstream |
| | | (SEQ ID NO: 797) | | |
| CEP290-B1080 | − | GUCAUCUAGAGCAAGAG | 17 | downstream |
| | | (SEQ ID NO: 798) | | |
| CEP290-B1081 | + | GUCCUCAGUAAAAGGUA | 17 | upstream |
| | | (SEQ ID NO: 799) | | |
| CEP290-B1082 | + | GUGAAAGGAUCUUAGAU | 17 | upstream |
| | | (SEQ ID NO: 800) | | |
| CEP290-B1083 | − | GUGCUCUUUUCUAUAUA | 17 | downstream |
| | | (SEQ ID NO: 801) | | |
| CEP290-B1084 | − | GUGUCAAAUAUGGUGCU | 17 | downstream |
| | | (SEQ ID NO: 802) | | |
| CEP290-B1085 | + | GUUCCCUAUAUAUAGAA | 17 | downstream |
| | | (SEQ ID NO: 803) | | |

[0907] Table 5D provides targeting domains for break-induced deletion of genomic sequence including the mutation at the LCA10 target position in the CEP290 gene selected according to the fourth tier parameters. The targeting domains are within 400 bp upstream of an Alu repeat or 700 bp downstream of the mutation, and do not start with G. It is contemplated herein that the targeting domain hybridizes to the target domain through complementary base pairing. Any of the targeting domains in the table can be used with a S. aureus Cas9 molecule that generates a double stranded break (Cas9 nuclease) or a single-stranded break (Cas9 nickase).

TABLE 5D

| | | | Target | Position |
|---|---|---|---|---|
| | DNA | | Site | relative to |
| gRNA Name | Strand | Targeting Domain | Length | mutation |
| CEP290-B1086 | + | AAAACUAAGACACUGCCAAU | 20 | downstream |
| | | (SEQ ID NO: 610) | | |
| CEP290-B1087 | + | AAAAGACUUAUAUUCCAUUA | 20 | downstream |
| | | (SEQ ID NO: 685) | | |
| CEP290-B1088 | + | AAACAUGACUCAUAAUUUAG | 20 | upstream |
| | | (SEQ ID NO: 805) | | |
| CEP290-B1089 | + | AAACAUGACUCAUAAUUUAG | 20 | upstream |
| | | (SEQ ID NO: 805) | | |
| CEP290-B1090 | + | AAAGAUGAAAAAUACUCUUU | 20 | upstream |
| | | (SEQ ID NO: 737) | | |
| CEP290-B1091 | + | AAAUUCACUGAGCAAAACAA | 20 | downstream |
| | | (SEQ ID NO: 808) | | |
| CEP290-B1092 | + | AACAAGUUUUGAAACAGGAA | 20 | downstream |
| | | (SEQ ID NO: 809) | | |
| CEP290-B1093 | + | AACAGGAGAUACUCAACACA | 20 | downstream |
| | | (SEQ ID NO: 810) | | |
| CEP290-B1094 | + | AACAUGACUCAUAAUUUAGU | 20 | upstream |
| | | (SEQ ID NO: 721) | | |
| CEP290-B1095 | + | AACAUGACUCAUAAUUUAGU | 20 | upstream |
| | | (SEQ ID NO: 721) | | |
| CEP290-B1096 | − | AAUAUAAGUCUUUUGAUAUA | 20 | downstream |
| | | (SEQ ID NO: 687) | | |
| CEP290-B1097 | + | AAUCACUCUCAUGUAUUAGC | 20 | downstream |
| | | (SEQ ID NO: 814) | | |
| CEP290-B1098 | + | AAUUCACUGAGCAAAACAAC | 20 | downstream |
| | | (SEQ ID NO: 678) | | |
| CEP290-B1099 | + | ACAAAAGAACAUACAUAAGA | 20 | downstream |
| | | (SEQ ID NO: 816) | | |
| CEP290-B1100 | + | ACGUACAAAAGAACAUACAU | 20 | downstream |
| | | (SEQ ID NO: 817) | | |
| CEP290-B1101 | − | ACGUGCUCUUUUCUAUAUAU | 20 | downstream |
| | | (SEQ ID NO: 622) | | |
| CEP290-B1102 | − | ACGUUGUUCUGAGUAGCUUU | 20 | upstream |
| | | (SEQ ID NO: 749) | | |
| CEP290-B1103 | + | ACUGAGCAAAACAACUGGAA | 20 | downstream |
| | | (SEQ ID NO: 819) | | |
| CEP290-B1104 | + | AGAGGAUAGGACAGAGGACA | 20 | upstream |
| | | (SEQ ID NO: 735) | | |
| CEP290-B1105 | + | AGAUGCAGAACUAGUGUAGA | 20 | downstream |
| | | (SEQ ID NO: 821) | | |
| CEP290-B1106 | + | AGCAAAAGCUUUUGAGCUAA | 20 | upstream |
| | | (SEQ ID NO: 763) | | |
| CEP290-B1107 | − | AGCAUUAGAAAGUCCUAGGC | 20 | upstream |
| | | (SEQ ID NO: 823) | | |
| CEP290-B1108 | + | AGCUUGAACUCUGUGCCAAA | 20 | downstream |
| | | (SEQ ID NO: 824) | | |
| CEP290-B1109 | + | AGCUUUUGACAGUUUUUAAG | 20 | downstream |
| | | (SEQ ID NO: 825) | | |
| CEP290-B1110 | + | AGGACAGAGGACAUGGAGAA | 20 | upstream |
| | | (SEQ ID NO: 736) | | |
| CEP290-B1111 | + | AGGAUAGGACAGAGGACAUG | 20 | upstream |
| | | (SEQ ID NO: 827) | | |
| CEP290-B1112 | + | AGGUAAUGCCUGAACAAGUU | 20 | downstream |
| | | (SEQ ID NO: 828) | | |
| CEP290-B1113 | + | AUAAGAAAGAACACUGUGGU | 20 | downstream |
| | | (SEQ ID NO: 829) | | |
| CEP290-B1114 | + | AUAAGCCUCUAUUUCUGAUG | 20 | upstream |
| | | (SEQ ID NO: 723) | | |
| CEP290-B1115 | − | AUACAUGAGAGUGAUUAGUG | 20 | downstream |
| | | (SEQ ID NO: 831) | | |
| CEP290-B1116 | + | AUAGAAAAGAGCACGUACAA | 20 | downstream |
| | | (SEQ ID NO: 832) | | |
| CEP290-B1117 | + | AUCAUUCUUGUGGCAGUAAG | 20 | downstream |
| | | (SEQ ID NO: 833) | | |
| CEP290-B1118 | + | AUCUUAUUCUACUCCUGUGA | 20 | upstream |
| | | (SEQ ID NO: 764) | | |
| CEP290-B1119 | − | AUCUUGUGGAUAAUGUAUCA | 20 | upstream |
| | | (SEQ ID NO: 835) | | |
| CEP290-B1120 | + | AUGAGGAAGAUGAACAAAUC | 20 | upstream |
| | | (SEQ ID NO: 733) | | |
| CEP290-B1121 | + | AUGAUCAUUCUUGUGGCAGU | 20 | downstream |
| | | (SEQ ID NO: 837) | | |
| CEP290-B1122 | + | AUGCUGGAGAGGAUAGGACA | 20 | upstream |
| | | (SEQ ID NO: 838) | | |
| CEP290-B1123 | + | AUGGUUCCCUAUAUAUAGAA | 20 | downstream |
| | | (SEQ ID NO: 839) | | |
| CEP290-B1124 | − | AUUUAAUUUGUUUCUGUGUG | 20 | downstream |
| | | (SEQ ID NO: 840) | | |
| CEP290-B1125 | + | CAAAACCUAUGUAUAAGAUG | 20 | downstream |
| | | (SEQ ID NO: 841) | | |
| CEP290-B1126 | + | CAAAAGACUUAUAUUCCAUU | 20 | downstream |
| | | (SEQ ID NO: 842) | | |
| CEP290-B1127 | − | CAAAAGCUUUUGCUGGCUCA | 20 | upstream |
| | | (SEQ ID NO: 762) | | |
| CEP290-B1128 | − | CAAGAAUGAUCAUUCUAAAC | 20 | downstream |
| | | (SEQ ID NO: 844) | | |
| CEP290-B1129 | − | CACAGAGUUCAAGCUAAUAC | 20 | downstream |
| | | (SEQ ID NO: 845) | | |
| CEP290-B1130 | + | CACAGGGUAGGAUUCAUGUU | 20 | downstream |
| | | (SEQ ID NO: 846) | | |
| CEP290-B1131 | + | CACUGCCAAUAGGGAUAGGU | 20 | downstream |
| | | (SEQ ID NO: 613) | | |
| CEP290-B1132 | + | CAGAACAACGUUUUCAUUUA | 20 | upstream |
| | | (SEQ ID NO: 761) | | |
| CEP290-B1133 | − | CAGAGUUCAAGCUAAUACAU | 20 | downstream |
| | | (SEQ ID NO: 848) | | |
| CEP290-B1134 | − | CAGUAAAUGAAAACGUUGUU | 20 | upstream |
| | | (SEQ ID NO: 849) | | |
| CEP290-B1135 | − | CAGUAAAUGAAAACGUUGUU | 20 | upstream |
| | | (SEQ ID NO: 849) | | |
| CEP290-B1136 | + | CAGUAAGGAGGAUGUAAGAC | 20 | downstream |
| | | (SEQ ID NO: 676) | | |
| CEP290-B1137 | + | CAUAAGCCUCUAUUUCUGAU | 20 | upstream |
| | | (SEQ ID NO: 851) | | |
| CEP290-B1138 | − | CAUAGAGACACAUUCAGUAA | 20 | upstream |
| | | (SEQ ID NO: 750) | | |
| CEP290-B1139 | + | CAUCUCUUGCUCUAGAUGAC | 20 | downstream |
| | | (SEQ ID NO: 853) | | |
| CEP290-B1140 | − | CAUGAGAGUGAUUAGUGGUG | 20 | downstream |
| | | (SEQ ID NO: 854) | | |
| CEP290-B1141 | − | CAUGUCAUCUAGAGCAAGAG | 20 | downstream |
| | | (SEQ ID NO: 855) | | |
| CEP290-B1142 | + | CAUUUACUGAAUGUGUCUCU | 20 | upstream |
| | | (SEQ ID NO: 856) | | |
| CEP290-B1143 | + | CAUUUACUGAAUGUGUCUCU | 20 | upstream |
| | | (SEQ ID NO: 856) | | |
| CEP290-B1144 | + | CCAUUAAAAAAAGUAUGCUU | 20 | downstream |
| | | (SEQ ID NO: 857) | | |
| CEP290-B1145 | + | CCUAGGACUUUCUAAUGCUG | 20 | upstream |
| | | (SEQ ID NO: 858) | | |
| CEP290-B1146 | + | CCUCUCUUUGGCAAAAGCAG | 20 | upstream |
| | | (SEQ ID NO: 859) | | |
| CEP290-B1147 | + | CCUCUCUUUGGCAAAAGCAG | 20 | upstream |
| | | (SEQ ID NO: 859) | | |
| CEP290-B1148 | + | CCUGUGAAAGGAUCUUAGAU | 20 | upstream |
| | | (SEQ ID NO: 860) | | |
| CEP290-B1149 | − | CGUGCUCUUUUCUAUAUAUA | 20 | downstream |
| | | (SEQ ID NO: 624) | | |
| CEP290-B1150 | − | CUAAGAUCCUUUCACAGGAG | 20 | upstream |
| | | (SEQ ID NO: 861) | | |
| CEP290-B1151 | + | CUAGAUGACAUGAGGUAAGU | 20 | downstream |
| | | (SEQ ID NO: 671) | | |
| CEP290-B1152 | + | CUAUGAGCCAGCAAAAGCUU | 20 | upstream |
| | | (SEQ ID NO: 748) | | |
| CEP290-B1153 | + | CUCAUAAUUUAGUAGGAAUC | 20 | upstream |
| | | (SEQ ID NO: 864) | | |
| CEP290-B1154 | + | CUCAUAAUUUAGUAGGAAUC | 20 | upstream |
| | | (SEQ ID NO: 864) | | |
| CEP290-B1155 | − | CUCAUCAGAAAUAGAGGCUU | 20 | upstream |
| | | (SEQ ID NO: 865) | | |
| CEP290-B1156 | + | CUCUAUUUCUGAUGAGGAAG | 20 | upstream |
| | | (SEQ ID NO: 866) | | |
| CEP290-B1157 | − | CUUAAGCAUACUUUUUUUAA | 20 | downstream |
| | | (SEQ ID NO: 690) | | |
| CEP290-B1158 | − | CUUAUCUAAGAUCCUUUCAC | 20 | upstream |
| | | (SEQ ID NO: 734) | | |
| CEP290-B1159 | + | CUUUCUAAUGCUGGAGAGGA | 20 | upstream |
| | | (SEQ ID NO: 869) | | |
| CEP290-B1160 | + | CUUUUGACAGUUUUUAAGGC | 20 | downstream |
| | | (SEQ ID NO: 684) | | |
| CEP290-B1161 | + | UAAAACUAAGACACUGCCAA | 20 | downstream |
| | | (SEQ ID NO: 871) | | |
| CEP290-B1162 | + | UAAGAAAAAAAAGGUAAUGC | 20 | downstream |
| | | (SEQ ID NO: 872) | | |
| CEP290-B1163 | + | UAAUGCUGGAGAGGAUAGGA | 20 | upstream |
| | | (SEQ ID NO: 873) | | |
| CEP290-B1164 | − | UACAUAUCUGUCUUCCUUAA | 20 | downstream |
| | | (SEQ ID NO: 689) | | |
| CEP290-B1165 | − | UACAUCCUCCUUACUGCCAC | 20 | downstream |
| | | (SEQ ID NO: 875) | | |
| CEP290-B1166 | − | UACAUGAGAGUGAUUAGUGG | 20 | downstream |
| | | (SEQ ID NO: 628) | | |
| CEP290-B1167 | − | UACCUCAUGUCAUCUAGAGC | 20 | downstream |
| | | (SEQ ID NO: 876) | | |
| CEP290-B1168 | − | UACGUGCUCUUUUCUAUAUA | 20 | downstream |
| | | (SEQ ID NO: 877) | | |
| CEP290-B1169 | − | UAGAGCAAGAGAUGAACUAG | 20 | downstream |
| | | (SEQ ID NO: 878) | | |
| CEP290-B1170 | + | UAGAUGACAUGAGGUAAGUA | 20 | downstream |
| | | (SEQ ID NO: 680) | | |
| CEP290-B1171 | + | UAGGAAUCCUGAAAGCUACU | 20 | upstream |
| | | (SEQ ID NO: 760) | | |
| CEP290-B1172 | + | UAGGACAGAGGACAUGGAGA | 20 | upstream |
| | | (SEQ ID NO: 881) | | |
| CEP290-B1173 | + | UAGGACUUUCUAAUGCUGGA | 20 | upstream |
| | | (SEQ ID NO: 882) | | |
| CEP290-B1174 | + | UCACUGAGCAAAACAACUGG | 20 | downstream |
| | | (SEQ ID NO: 883) | | |
| CEP290-B1175 | − | UCAUGUUUAUCAAUAUUAUU | 20 | upstream |
| | | (SEQ ID NO: 884) | | |
| CEP290-B1176 | − | UCAUGUUUAUCAAUAUUAUU | 20 | upstream |
| | | (SEQ ID NO: 884) | | |
| CEP290-B1177 | + | UCCACAAGAUGUCUCUUGCC | 20 | upstream |
| | | (SEQ ID NO: 885) | | |
| CEP290-B1178 | + | UCCAUAAGCCUCUAUUUCUG | 20 | upstream |
| | | (SEQ ID NO: 886) | | |
| CEP290-B1179 | − | UCCUAGGCAAGAGACAUCUU | 20 | upstream |
| | | (SEQ ID NO: 887) | | |
| CEP290-B1180 | + | UCUAGAUGACAUGAGGUAAG | 20 | downstream |
| | | (SEQ ID NO: 888) | | |
| CEP290-B1181 | − | UCUAUACCUUUUACUGAGGA | 20 | upstream |
| | | (SEQ ID NO: 889) | | |
| CEP290-B1182 | + | UCUGUCCUCAGUAAAAGGUA | 20 | upstream |
| | | (SEQ ID NO: 890) | | |
| CEP290-B1183 | − | UCUUAAGCAUACUUUUUUUA | 20 | downstream |
| | | (SEQ ID NO: 891) | | |
| CEP290-B1184 | − | UCUUAUCUAAGAUCCUUUCA | 20 | upstream |
| | | (SEQ ID NO: 892) | | |
| CEP290-B1185 | − | UCUUCCAGUUGUUUUGCUCA | 20 | downstream |
| | | (SEQ ID NO: 893) | | |
| CEP290-B1186 | + | UGAGCAAAACAACUGGAAGA | 20 | downstream |
| | | (SEQ ID NO: 894) | | |
| CEP290-B1187 | − | UGAGUAUCUCCUGUUUGGCA | 20 | downstream |
| | | (SEQ ID NO: 895) | | |
| CEP290-B1188 | + | UGAUCAUUCUUGUGGCAGUA | 20 | downstream |
| | | (SEQ ID NO: 688) | | |
| CEP290-B1189 | + | UGCCUAGGACUUUCUAAUGC | 20 | upstream |
| | | (SEQ ID NO: 632) | | |
| CEP290-B1190 | + | UGCCUGAACAAGUUUUGAAA | 20 | downstream |
| | | (SEQ ID NO: 897) | | |
| CEP290-B1191 | − | UGGUGUCAAAUAUGGUGCUU | 20 | downstream |
| | | (SEQ ID NO: 625) | | |
| CEP290-B1192 | + | UGUAAGACUGGAGAUAGAGA | 20 | downstream |
| | | (SEQ ID NO: 898) | | |
| CEP290-B1193 | − | UGUCCUAUCCUCUCCAGCAU | 20 | upstream |
| | | (SEQ ID NO: 899) | | |
| CEP290-B1194 | − | UUAACGUUAUCAUUUUCCC | 20 | upstream |
| | | (SEQ ID NO: 900) | | |
| CEP290-B1195 | − | UUACAUAUCUGUCUUCCUUA | 20 | downstream |
| | | (SEQ ID NO: 901) | | |
| CEP290-B1196 | + | UUAGAUCUUAUUCUACUCCU | 20 | upstream |
| | | (SEQ ID NO: 902) | | |
| CEP290-B1197 | + | UUAGAUCUUAUUCUACUCCU | 20 | upstream |
| | | (SEQ ID NO: 902) | | |
| CEP290-B1198 | − | UUCAGGAUUCCUACUAAAUU | 20 | upstream |
| | | (SEQ ID NO: 904) | | |
| CEP290-B1199 | − | UUCAGGAUUCCUACUAAAUU | 20 | upstream |
| | | (SEQ ID NO: 904) | | |
| CEP290-B1200 | − | UUCAUCUUCCUCAUCAGAAA | 20 | upstream |
| | | (SEQ ID NO: 905) | | |
| CEP290-B1201 | + | UUGCCUAGGACUUUCUAAUG | 20 | upstream |
| | | (SEQ ID NO: 906) | | |
| CEP290-B1202 | − | UUUCUGCUGCUUUUGCCAAA | 20 | upstream |
| | | (SEQ ID NO: 907) | | |
| CEP290-B1203 | − | UUUCUGCUGCUUUUGCCAAA | 20 | upstream |
| | | (SEQ ID NO: 907) | | |
| CEP290-B1204 | + | UUUUGACAGUUUUUAAGGCG | 20 | downstream |
| | | (SEQ ID NO: 681) | | |
| CEP290-B1205 | + | UUUUUAAGGCGGGGAGUCAC | 20 | downstream |
| | | (SEQ ID NO: 909) | | |
| CEP290-B1206 | + | AAAAGCUUUUGAGCUAA | 17 | upstream |
| | | (SEQ ID NO: 767) | | |
| CEP290-B1207 | + | AAAGAACAUACAUAAGA | 17 | downstream |
| | | (SEQ ID NO: 911) | | |
| CEP290-B1208 | + | AAAUGGUUCCCUAUAUA | 17 | downstream |
| | | (SEQ ID NO: 912) | | |
| CEP290-B1209 | + | AACAACGUUUUCAUUUA | 17 | upstream |
| | | (SEQ ID NO: 765) | | |
| CEP290-B1210 | + | AACCUAUGUAUAAGAUG | 17 | downstream |
| | | (SEQ ID NO: 914) | | |
| CEP290-B1211 | + | AACUAAGACACUGCCAA | 17 | downstream |
| | | (SEQ ID NO: 915) | | |
| CEP290-B1212 | + | AAGACUGGAGAUAGAGA | 17 | downstream |
| | | (SEQ ID NO: 916) | | |
| CEP290-B1213 | + | AAGACUUAUAUUCCAUU | 17 | downstream |
| | | (SEQ ID NO: 917) | | |
| CEP290-B1214 | + | AAGAUGAAAAAUACUCU | 17 | upstream |
| | | (SEQ ID NO: 918) | | |
| CEP290-B1215 | − | AAGCAUACUUUUUUUAA | 17 | downstream |
| | | (SEQ ID NO: 667) | | |
| CEP290-B1216 | + | AAGCCUCUAUUUCUGAU | 17 | upstream |
| | | (SEQ ID NO: 920) | | |
| CEP290-B1217 | − | AAGCUUUUGCUGGCUCA | 17 | upstream |
| | | (SEQ ID NO: 766) | | |
| CEP290-B1218 | + | AAGUUUUGAAACAGGAA | 17 | downstream |
| | | (SEQ ID NO: 922) | | |
| CEP290-B1219 | + | ACAAGAUGUCUCUUGCC | 17 | upstream |
| | | (SEQ ID NO: 923) | | |
| CEP290-B1220 | + | ACAGAGGACAUGGAGAA | 17 | upstream |
| | | (SEQ ID NO: 715) | | |
| CEP290-B1221 | + | ACAGGAAUAGAAAUUCA | 17 | downstream |
| | | (SEQ ID NO: 925) | | |
| CEP290-B1222 | + | ACAUGGGAGUCACAGGG | 17 | downstream |
| | | (SEQ ID NO: 926) | | |
| CEP290-B1223 | − | ACGUUAUCAUUUUCCCA | 17 | upstream |
| | | (SEQ ID NO: 927) | | |
| CEP290-B1224 | + | ACUAAGACACUGCCAAU | 17 | downstream |
| | | (SEQ ID NO: 603) | | |
| CEP290-B1225 | + | AGAAAGAACACUGUGGU | 17 | downstream |
| | | (SEQ ID NO: 928) | | |
| CEP290-B1226 | + | AGACUGGAGAUAGAGAC | 17 | downstream |
| | | (SEQ ID NO: 664) | | |
| CEP290-B1227 | + | AGACUUAUAUUCCAUUA | 17 | downstream |
| | | (SEQ ID NO: 651) | | |
| CEP290-B1228 | − | AGAGACACAUUCAGUAA | 17 | upstream |
| | | (SEQ ID NO: 754) | | |
| CEP290-B1229 | − | AGAGUUCAAGCUAAUAC | 17 | downstream |
| | | (SEQ ID NO: 931) | | |
| CEP290-B1230 | − | AGAUCCUUUCACAGGAG | 17 | upstream |
| | | (SEQ ID NO: 932) | | |
| CEP290-B1231 | + | AGAUGAAAAAUACUCUU | 17 | upstream |
| | | (SEQ ID NO: 718) | | |
| CEP290-B1232 | + | AGAUGACAUGAGGUAAG | 17 | downstream |
| | | (SEQ ID NO: 934) | | |
| CEP290-B1233 | − | AGCAAGAGAUGAACUAG | 17 | downstream |
| | | (SEQ ID NO: 935) | | |
| CEP290-B1234 | + | AGCCUCUAUUUCUGAUG | 17 | upstream |
| | | (SEQ ID NO: 709) | | |
| CEP290-B1235 | + | AGGAAGAUGAACAAAUC | 17 | upstream |
| | | (SEQ ID NO: 717) | | |
| CEP290-B1236 | + | AGGACUUUCUAAUGCUG | 17 | upstream |
| | | (SEQ ID NO: 938) | | |
| CEP290-B1237 | + | AGGAGAUACUCAACACA | 17 | downstream |
| | | (SEQ ID NO: 939) | | |
| CEP290-B1238 | + | AGGAUAGGACAGAGGAC | 17 | upstream |
| | | (SEQ ID NO: 940) | | |
| CEP290-B1239 | − | AGGAUUCCUACUAAAUU | 17 | upstream |
| | | (SEQ ID NO: 941) | | |
| CEP290-B1240 | − | AGGAUUCCUACUAAAUU | 17 | upstream |
| | | (SEQ ID NO: 941) | | |
| CEP290-B1241 | + | AGGGUAGGAUUCAUGUU | 17 | downstream |
| | | (SEQ ID NO: 942) | | |
| CEP290-B1242 | − | AGUUCAAGCUAAUACAU | 17 | downstream |
| | | (SEQ ID NO: 943) | | |
| CEP290-B1243 | + | AUAAGCCUCUAUUUCUG | 17 | upstream |
| | | (SEQ ID NO: 944) | | |
| CEP290-B1244 | − | AUAAGUCUUUUGAUAUA | 17 | downstream |
| | | (SEQ ID NO: 661) | | |
| CEP290-B1245 | + | AUAAUUUAGUAGGAAUC | 17 | upstream |
| | | (SEQ ID NO: 946) | | |
| CEP290-B1246 | + | AUAAUUUAGUAGGAAUC | 17 | upstream |
| | | (SEQ ID NO: 946) | | |
| CEP290-B1247 | − | AUACCUUUUACUGAGGA | 17 | upstream |
| | | (SEQ ID NO: 947) | | |
| CEP290-B1248 | − | AUAGAGGCUUAUGGAUU | 17 | upstream |
| | | (SEQ ID NO: 948) | | |
| CEP290-B1249 | + | AUAGGACAGAGGACAUG | 17 | upstream |
| | | (SEQ ID NO: 949) | | |
| CEP290-B1250 | − | AUAUCUGUCUUCCUUAA | 17 | downstream |
| | | (SEQ ID NO: 658) | | |
| CEP290-B1251 | − | AUCAGAAAUAGAGGCUU | 17 | upstream |
| | | (SEQ ID NO: 951) | | |
| CEP290-B1252 | + | AUCAUUCUUGUGGCAGU | 17 | downstream |
| | | (SEQ ID NO: 952) | | |
| CEP290-B1253 | − | AUCCUCCUUACUGCCAC | 17 | downstream |
| | | (SEQ ID NO: 953) | | |
| CEP290-B1254 | − | AUCUAAGAUCCUUUCAC | 17 | upstream |
| | | (SEQ ID NO: 696) | | |
| CEP290-B1255 | − | AUCUUCCUCAUCAGAAA | 17 | upstream |
| | | (SEQ ID NO: 955) | | |
| CEP290-B1256 | + | AUGACAUGAGGUAAGUA | 17 | downstream |
| | | (SEQ ID NO: 656) | | |
| CEP290-B1257 | + | AUGACUCAUAAUUUAGU | 17 | upstream |
| | | (SEQ ID NO: 704) | | |
| CEP290-B1258 | + | AUGACUCAUAAUUUAGU | 17 | upstream |
| | | (SEQ ID NO: 704) | | |
| CEP290-B1259 | − | AUGAGAGUGAUUAGUGG | 17 | downstream |
| | | (SEQ ID NO: 645) | | |
| CEP290-B1260 | − | AUUAGAAAGUCCUAGGC | 17 | upstream |
| | | (SEQ ID NO: 957) | | |
| CEP290-B1261 | + | AUUCUUGUGGCAGUAAG | 17 | downstream |
| | | (SEQ ID NO: 958) | | |
| CEP290-B1262 | + | CACUCUCAUGUAUUAGC | 17 | downstream |
| | | (SEQ ID NO: 959) | | |
| CEP290-B1263 | − | CAUAUCUGUCUUCCUUA | 17 | downstream |
| | | (SEQ ID NO: 960) | | |
| CEP290-B1264 | + | CAUGACUCAUAAUUUAG | 17 | upstream |
| | | (SEQ ID NO: 961) | | |
| CEP290-B1265 | + | CAUGACUCAUAAUUUAG | 17 | upstream |
| | | (SEQ ID NO: 961) | | |
| CEP290-B1266 | − | CAUGAGAGUGAUUAGUG | 17 | downstream |
| | | (SEQ ID NO: 962) | | |
| CEP290-B1267 | + | CCUAGGACUUUCUAAUG | 17 | upstream |
| | | (SEQ ID NO: 963) | | |
| CEP290-B1268 | − | CCUAUCCUCUCCAGCAU | 17 | upstream |
| | | (SEQ ID NO: 964) | | |
| CEP290-B1269 | + | CUAGGACUUUCUAAUGC | 17 | upstream |
| | | (SEQ ID NO: 695) | | |
| CEP290-B1270 | − | CUCAUGUCAUCUAGAGC | 17 | downstream |
| | | (SEQ ID NO: 966) | | |
| CEP290-B1271 | + | CUCUUGCUCUAGAUGAC | 17 | downstream |
| | | (SEQ ID NO: 967) | | |
| CEP290-B1272 | + | CUCUUUGGCAAAAGCAG | 17 | upstream |
| | | (SEQ ID NO: 968) | | |
| CEP290-B1273 | + | CUCUUUGGCAAAAGCAG | 17 | upstream |
| | | (SEQ ID NO: 968) | | |
| CEP290-B1274 | + | CUGAACAAGUUUUGAAA | 17 | downstream |
| | | (SEQ ID NO: 970) | | |
| CEP290-B1275 | + | CUGAGCAAAACAACUGG | 17 | downstream |
| | | (SEQ ID NO: 971) | | |
| CEP290-B1276 | − | CUGCUGCUUUUGCCAAA | 17 | upstream |
| | | (SEQ ID NO: 972) | | |
| CEP290-B1277 | − | CUGCUGCUUUUGCCAAA | 17 | upstream |
| | | (SEQ ID NO: 972) | | |
| CEP290-B1278 | + | CUGGAGAGGAUAGGACA | 17 | upstream |
| | | (SEQ ID NO: 973) | | |
| CEP290-B1279 | − | UAAAUGAAAACGUUGUU | 17 | upstream |
| | | (SEQ ID NO: 974) | | |
| CEP290-B1280 | − | UAAAUGAAAACGUUGUU | 17 | upstream |
| | | (SEQ ID NO: 974) | | |
| CEP290-B1281 | − | UAAGCAUACUUUUUUUA | 17 | downstream |
| | | (SEQ ID NO: 975) | | |
| CEP290-B1282 | + | UAAGGAGGAUGUAAGAC | 17 | downstream |
| | | (SEQ ID NO: 648) | | |
| CEP290-B1283 | + | UAAUGCCUGAACAAGUU | 17 | downstream |
| | | (SEQ ID NO: 976) | | |
| CEP290-B1284 | − | UAAUUUGUUUCUGUGUG | 17 | downstream |
| | | (SEQ ID NO: 977) | | |
| CEP290-B1285 | + | UACAAAAGAACAUACAU | 17 | downstream |
| | | (SEQ ID NO: 978) | | |
| CEP290-B1286 | − | UAGGCAAGAGACAUCUU | 17 | upstream |
| | | (SEQ ID NO: 979) | | |
| CEP290-B1287 | − | UAUAAGUCUUUUGAUAU | 17 | downstream |
| | | (SEQ ID NO: 980) | | |
| CEP290-B1288 | − | UAUCUAAGAUCCUUUCA | 17 | upstream |
| | | (SEQ ID NO: 981) | | |
| CEP290-B1289 | + | UAUUUCUGAUGAGGAAG | 17 | upstream |
| | | (SEQ ID NO: 982) | | |
| CEP290-B1290 | + | UCACUGAGCAAAACAAC | 17 | downstream |
| | | (SEQ ID NO: 650) | | |
| CEP290-B1291 | + | UCAUUCUUGUGGCAGUA | 17 | downstream |
| | | (SEQ ID NO: 2780) | | |
| CEP290-B1292 | − | UCCAGUUGUUUUGCUCA | 17 | downstream |
| | | (SEQ ID NO: 983) | | |
| CEP290-B1293 | + | UCUAAUGCUGGAGAGGA | 17 | upstream |
| | | (SEQ ID NO: 984) | | |
| CEP290-B1294 | + | UGAACAAGUUUUGAAAC | 17 | downstream |
| | | (SEQ ID NO: 659) | | |
| CEP290-B1295 | + | UGAACUCUGUGCCAAAC | 17 | downstream |
| | | (SEQ ID NO: 638) | | |
| CEP290-B1296 | + | UGACAGUUUUUAAGGCG | 17 | downstream |
| | | (SEQ ID NO: 642) | | |
| CEP290-B1297 | + | UGAGCCAGCAAAAGCUU | 17 | upstream |
| | | (SEQ ID NO: 752) | | |
| CEP290-B1298 | + | UGCAGAACUAGUGUAGA | 17 | downstream |
| | | (SEQ ID NO: 987) | | |
| CEP290-B1299 | + | UGCCAAUAGGGAUAGGU | 17 | downstream |
| | | (SEQ ID NO: 614) | | |
| CEP290-B1300 | − | UGCUCUUUUCUAUAUAU | 17 | downstream |
| | | (SEQ ID NO: 663) | | |
| CEP290-B1301 | + | UGCUGGAGAGGAUAGGA | 17 | upstream |
| | | (SEQ ID NO: 989) | | |
| CEP290-B1302 | − | UGUCAAAUAUGGUGCUU | 17 | downstream |
| | | (SEQ ID NO: 643) | | |
| CEP290-B1303 | − | UGUUUAUCAAUAUUAUU | 17 | upstream |
| | | (SEQ ID NO: 990) | | |
| CEP290-B1304 | − | UGUUUAUCAAUAUUAUU | 17 | upstream |
| | | (SEQ ID NO: 990) | | |
| CEP290-B1305 | + | UUAAAAAAAGUAUGCUU | 17 | downstream |
| | | (SEQ ID NO: 991) | | |
| CEP290-B1306 | + | UUAAGGCGGGGAGUCAC | 17 | downstream |
| | | (SEQ ID NO: 992) | | |
| CEP290-B1307 | + | UUACUGAAUGUGUCUCU | 17 | upstream |
| | | (SEQ ID NO: 993) | | |
| CEP290-B1308 | + | UUACUGAAUGUGUCUCU | 17 | upstream |
| | | (SEQ ID NO: 993) | | |
| CEP290-B1309 | + | UUAUUCUACUCCUGUGA | 17 | upstream |
| | | (SEQ ID NO: 768) | | |
| CEP290-B1310 | + | UUCACUGAGCAAAACAA | 17 | downstream |
| | | (SEQ ID NO: 995) | | |
| CEP290-B1311 | − | UUCUGCUGCUUUUGCCA | 17 | upstream |
| | | (SEQ ID NO: 996) | | |
| CEP290-B1312 | − | UUCUGCUGCUUUUGCCA | 17 | upstream |
| | | (SEQ ID NO: 996) | | |
| CEP290-B1313 | + | UUGAACUCUGUGCCAAA | 17 | downstream |
| | | (SEQ ID NO: 997) | | |
| CEP290-B1314 | + | UUGACAGUUUUUAAGGC | 17 | downstream |
| | | (SEQ ID NO: 654) | | |
| CEP290-B1315 | − | UUGUGGAUAAUGUAUCA | 17 | upstream |
| | | (SEQ ID NO: 999) | | |
| CEP290-B1316 | − | UUGUUCAUCUUCCUCAU | 17 | upstream |
| | | (SEQ ID NO: 1000) | | |
| CEP290-B1317 | − | UUGUUCUGAGUAGCUUU | 17 | upstream |
| | | (SEQ ID NO: 753) | | |
| CEP290-B1318 | + | UUUGACAGUUUUUAAGG | 17 | downstream |
| | | (SEQ ID NO: 662) | | |
| CEP290-B1319 | + | UUUUGACAGUUUUUAAG | 17 | downstream |
| | | (SEQ ID NO: 1003) | | |

[0908] Table 6A provides targeting domains for break-induced deletion of genomic sequence including the mutation at the LCA10 target position in the CEP290 gene selected according to the first tier parameters. The targeting domains are within 400 bp upstream of an Alu repeat or 700 bp downstream of the mutation, have good orthogonality, and start with G. It is contemplated herein that the targeting domain hybridizes to the target domain through complementary base pairing. Any of the targeting domains in the table can be used with a N. meningitidis Cas9 molecule that generates a double stranded break (Cas9 nuclease) or a single-stranded break (Cas9 nickase).

TABLE 6A

| | | | Target | Position |
|---|---|---|---|---|
| | | | | relative |
| gRNA | DNA | | Site | to |
| Name | Strand | Targeting Domain | Length | mutation |
| CEP290- | − | GAGUUCAAGCUAAUACAUGA | 20 | downstream |
| B65 | | (SEQ ID NO: 589) | | |
| CEP290- | − | GUUGUUCUGAGUAGCUU | 17 | upstream |
| B296 | | (SEQ ID NO: 590) | | |
| CEP290- | + | GGCAAAAGCAGCAGAAAGCA | 20 | upstream |
| B308 | | (SEQ ID NO: 591) | | |
| CEP290- | − | GUUGUUCUGAGUAGCUU | 17 | upstream |
| B536 | | (SEQ ID NO: 590) | | |
| CEP290- | + | GGCAAAAGCAGCAGAAAGCA | 20 | upstream |
| B482 | | (SEQ ID NO: 591) | | |

[0909] Table 6B provides targeting domains for break-induced deletion of genomic sequence including the mutation at the LCA10 target position in the CEP290 gene selected according to the second tier parameters. The targeting domains are within 400 bp upstream of an Alu repeat or 700 bp downstream of the mutation, have good orthogonality, and do not start with G. It is contemplated herein that the targeting domain hybridizes to the target domain through complementary base pairing. Any of the targeting domains in the table can be used with a N. meningitidis Cas9 molecule that generates a double stranded break (Cas9 nuclease) or a single-stranded break (Cas9 nickase).

TABLE 6B

| | | | Target | Position |
|---|---|---|---|---|
| | DNA | | Site | relative to |
| gRNA Name | Strand | Targeting Domain | Length | mutation |
| CEP290-B235 | − | UUCAAGCUAAUACAUGA | 17 | downstream |
| | | (SEQ ID NO: 1004) | | |
| CEP290-B109 | + | CACAUGGGAGUCACAGG | 17 | downstream |
| | | (SEQ ID NO: 1005) | | |
| CEP290-B129 | + | AGUCACAUGGGAGUCACAGG | 20 | downstream |
| | | (SEQ ID NO: 1006) | | |
| CEP290-B295 | − | AAUAGAGGCUUAUGGAU | 17 | upstream |
| | | (SEQ ID NO: 1007) | | |
| CEP290-B297 | − | CUGAGGACAGAACAAGC | 17 | upstream |
| | | (SEQ ID NO: 1008) | | |
| CEP290-B298 | − | CAUCAGAAAUAGAGGCU | 17 | upstream |
| | | (SEQ ID NO: 1009) | | |
| CEP290-B299 | − | CUGCUUUUGCCAAAGAG | 17 | upstream |
| | | (SEQ ID NO: 711) | | |
| CEP290-B300 | + | AGCAGAAAGCAAACUGA | 17 | upstream |
| | | (SEQ ID NO: 1011) | | |
| CEP290-B301 | + | AAAAGCAGCAGAAAGCA | 17 | upstream |
| | | (SEQ ID NO: 1012) | | |
| CEP290-B302 | − | UUACUGAGGACAGAACAAGC | 20 | upstream |
| | | (SEQ ID NO: 1013) | | |
| CEP290-B303 | − | AACGUUGUUCUGAGUAGCUU | 20 | upstream |
| | | (SEQ ID NO: 1014) | | |
| CEP290-B304 | − | CUGCUGCUUUUGCCAAAGAG | 20 | upstream |
| | | (SEQ ID NO: 725) | | |
| CEP290-B305 | − | AGAAAUAGAGGCUUAUGGAU | 20 | upstream |
| | | (SEQ ID NO: 1016) | | |
| CEP290-B306 | − | CCUCAUCAGAAAUAGAGGCU | 20 | upstream |
| | | (SEQ ID NO: 1017) | | |
| CEP290-B307 | + | AGCAGCAGAAAGCAAACUGA | 20 | upstream |
| | | (SEQ ID NO: 1018) | | |
| CEP290-B531 | − | CUGCUUUUGCCAAAGAG | 17 | upstream |
| | | (SEQ ID NO: 711) | | |
| CEP290-B522 | + | AGCAGAAAGCAAACUGA | 17 | upstream |
| | | (SEQ ID NO: 1011) | | |
| CEP290-B537 | + | AAAAGCAGCAGAAAGCA | 17 | upstream |
| | | (SEQ ID NO: 1012) | | |
| CEP290-B504 | − | AACGUUGUUCUGAGUAGCUU | 20 | upstream |
| | | (SEQ ID NO: 1014) | | |
| CEP290-B478 | − | CUGCUGCUUUUGCCAAAGAG | 20 | upstream |
| | | (SEQ ID NO: 725) | | |
| CEP290-B526 | + | AGCAGCAGAAAGCAAACUGA | 20 | upstream |
| | | (SEQ ID NO: 1018) | | |

[0910] Table 7A provides targeting domains for introduction of an indel (e.g., mediated by NHEJ) in close proximity to or including the LCA10 target position in the CEP290 gene selected according to the first tier parameters. The targeting domains are within 40 bases of the LCA10 target position, have good orthogonality, start with G and PAM is NNGRRT. It is contemplated herein that in an embodiment the targeting domain hybridizes to the target domain through complementary base pairing. Any of the targeting domains in the table can be used with a S. aureus Cas9 molecule that generates a double stranded break (Cas9 nuclease) or a single-stranded break (Cas9 nickase).

TABLE 7A

| | DNA | Targeting Domain | Target |
|---|---|---|---|
| gRNA Name | Strand | Length | Site |
| CEP290-12 | − | GCACCUGGCCCCAGUUGUAAUU | 22 |
| | | (SEQ ID NO: 398) | |

[0911] Table 7B provides targeting domains for introduction of an indel (e.g., mediated by NHEJ) in close proximity to or including the LCA10 target position in the CEP290 gene selected according to the second tier parameters. The targeting domains are within 40 bases of the LCA10 target position, have good orthogonality, and PAM is NNGRRT. It is contemplated herein that the targeting domain hybridizes to the target domain through complementary base pairing. Any of the targeting domains in the table can be used with a S. aureus Cas9 molecule that generates a double stranded break (Cas9 nuclease) or a single-stranded break (Cas9 nickase).

TABLE 7B

| | | | Target |
|---|---|---|---|
| | DNA | | Site |
| gRNA Name | Strand | Targeting Domain | Length |
| CEP290-35 | + | AAAUAAAACUAAGACACUGCCAAU | 24 |
| | | (SEQ ID NO: 1025) | |
| CEP290-36 | + | AAUAAAACUAAGACACUGCCAAU | 23 |
| | | (SEQ ID NO: 1026) | |
| CEP290-37 | + | AUAAAACUAAGACACUGCCAAU | 22 |
| | | (SEQ ID NO: 1027) | |
| CEP290-38 | + | AAAACUAAGACACUGCCAAU | 20 |
| | | (SEQ ID NO: 610) | |
| CEP290-39 | + | AAACUAAGACACUGCCAAU | 19 |
| | | (SEQ ID NO: 1028) | |
| CEP290-40 | + | AACUAAGACACUGCCAAU | 18 |
| | | (SEQ ID NO: 1029) | |
| CEP290-512 | − | ACCUGGCCCCAGUUGUAAUU | 20 |
| | | (SEQ ID NO: 616) | |
| CEP290-17 | − | CCGCACCUGGCCCCAGUUGUAAUU | 24 |
| | | (SEQ ID NO: 1030) | |
| CEP290-41 | − | CGCACCUGGCCCCAGUUGUAAUU | 23 |
| | | (SEQ ID NO: 1031) | |
| CEP290-42 | − | CACCUGGCCCCAGUUGUAAUU | 21 |
| | | (SEQ ID NO: 1032) | |
| CEP290-513 | − | CCUGGCCCCAGUUGUAAUU | 19 |
| | | (SEQ ID NO: 1033) | |
| CEP290-514 | − | CUGGCCCCAGUUGUAAUU | 18 |
| | | (SEQ ID NO: 1034) | |
| CEP290-43 | + | UAAAACUAAGACACUGCCAAU | 21 |
| | | (SEQ ID NO: 1035) | |

[0912] Table 7C provides targeting domains for introduction of an indel (e.g., mediated by NHEJ) in close proximity to or including the LCA10 target position in the CEP290 gene selected according to the fifth tier parameters. The targeting domains are within 40 bases of the LCA10 target position, and PAM is NNGRRV. It is contemplated herein that the targeting domain hybridizes to the target domain through complementary base pairing. Any of the targeting domains in the table can be used with a S. aureus Cas9 molecule that generates a double stranded break (Cas9 nuclease) or a single-stranded break (Cas9 nickase).

TABLE 7C

| | | | Target |
|---|---|---|---|
| | DNA | | Site |
| gRNA Name | Strand | Targeting Domain | Length |
| CEP290-44 | + | AAAAUAAAACUAAGACACUGCCAA | 24 |
| | | (SEQ ID NO: 1036) | |
| CEP290-45 | + | AAAUAAAACUAAGACACUGCCAA | 23 |
| | | (SEQ ID NO: 1037) | |
| CEP290-46 | + | AAUAAAACUAAGACACUGCCAA | 22 |
| | | (SEQ ID NO: 1038) | |
| CEP290-47 | + | AUAAAACUAAGACACUGCCAA | 21 |
| | | (SEQ ID NO: 1039) | |
| CEP290-48 | + | AAAACUAAGACACUGCCAA | 19 |
| | | (SEQ ID NO: 1040) | |
| CEP290-49 | + | AAACUAAGACACUGCCAA | 18 |
| | | (SEQ ID NO: 1041) | |
| CEP290-16 | + | AAGACACUGCCAAUAGGGAUAGGU | 24 |
| | | (SEQ ID NO: 1042) | |
| CEP290-50 | + | AGACACUGCCAAUAGGGAUAGGU | 23 |
| | | (SEQ ID NO: 1043) | |
| CEP290-51 | + | ACACUGCCAAUAGGGAUAGGU | 21 |
| | | (SEQ ID NO: 1044) | |
| CEP290-510 | + | ACUGCCAAUAGGGAUAGGU | 19 |
| | | (SEQ ID NO: 1045) | |
| CEP290-509 | + | CACUGCCAAUAGGGAUAGGU | 20 |
| | | (SEQ ID NO: 613) | |
| CEP290-511 | + | CUGCCAAUAGGGAUAGGU | 18 |
| | | (SEQ ID NO: 1046) | |
| CEP290-11 | + | GACACUGCCAAUAGGGAUAGGU | 22 |
| | | (SEQ ID NO: 1047) | |
| CEP290-52 | + | UAAAACUAAGACACUGCCAA | 20 |
| | | (SEQ ID NO: 871) | |
| CEP290-13 | + | AUGAGAUACUCACAAUUACAAC | 22 |
| | | (SEQ ID NO: 1049) | |
| CEP290-53 | + | AGAUACUCACAAUUACAAC | 19 |
| | | (SEQ ID NO: 1050) | |
| CEP290-18 | + | GUAUGAGAUACUCACAAUUACAAC | 24 |
| | | (SEQ ID NO: 1051) | |
| CEP290-54 | + | GAGAUACUCACAAUUACAAC | 20 |
| | | (SEQ ID NO: 395) | |
| CEP290-55 | + | GAUACUCACAAUUACAAC | 18 |
| | | (SEQ ID NO: 1052) | |
| CEP290-14 | + | UAUGAGAUACUCACAAUUACAAC | 23 |
| | | (SEQ ID NO: 1053) | |
| CEP290-57 | + | UGAGAUACUCACAAUUACAAC | 21 |
| | | (SEQ ID NO: 1054) | |
| CEP290-58 | + | AUGAGAUAUUCACAAUUACAA | 21 |
| | | (SEQ ID NO: 1055) | |
| CEP290-59 | + | AGAUAUUCACAAUUACAA | 18 |
| | | (SEQ ID NO: 1056) | |
| CEP290-19 | + | GGUAUGAGAUAUUCACAAUUACAA | 24 |
| | | (SEQ ID NO: 1057) | |
| CEP290-61 | + | GUAUGAGAUAUUCACAAUUACAA | 23 |
| | | (SEQ ID NO: 1058) | |
| CEP290-63 | + | GAGAUAUUCACAAUUACAA | 19 |
| | | (SEQ ID NO: 1059) | |
| CEP290-65 | + | UAUGAGAUAUUCACAAUUACAA | 22 |
| | | (SEQ ID NO: 1060) | |
| CEP290-66 | + | UGAGAUAUUCACAAUUACAA | 20 |
| | | (SEQ ID NO: 1061) | |

[0913] Table 7D provides targeting domains for introduction of an indel (e.g., mediated by NHEJ) in close proximity to or including the LCA10 target position in the CEP290 gene that can be used for dual targeting. Any of the targeting domains in the table can be used with a S. aureus Cas9 (nickase) molecule to generate a single stranded break. Exemplary nickase pairs including selecting a targeting domain from Group A and a second targeting domain from Group B. It is contemplated herein that a targeting domain of Group A can be combined with any of the targeting domains of Group B. For example, the CEP290-12 or CEP290-17 can be combined with CEP290-11 or CEP290-16.

TABLE 7D

| Group A | Group B |
|---|---|
| CEP290-12 | CEP290-11 |
| CEP290-17 | CEP290-16 |

[0914] Table 8A provides targeting domains for break-induced deletion of genomic sequence including the mutation at the LCA10 target position in the CEP290 gene selected according to the first tier parameters. The targeting domains are within 1000 bp upstream of an Alu repeat, within 40 bp upstream of mutation, or 1000 bp downstream of the mutation, have good orthogonality, and start with G. It is contemplated herein that the targeting domain hybridizes to the target domain through complementary base pairing. Any of the targeting domains in the table can be used with a S. pyogenes Cas9 molecule that generates a double stranded break (Cas9 nuclease) or a single-stranded break (Cas9 nickase).

TABLE 8A

| | | | Target | Position |
|---|---|---|---|---|
| | DNA | | Site | relative to |
| gRNA Name | Strand | Targeting Domain | Length | mutation |
| CEP290-67 | + | GAAAGAUGAAAAAUACUCUU | 20 | upstream |
| | | (SEQ ID NO: 462) | | |
| CEP290-68 | − | GAAAUAGAUGUAGAUUG | 17 | downstream |
| | | (SEQ ID NO: 463) | | |
| CEP290-70 | − | GAAAUAUUAAGGGCUCUUCC | 20 | upstream |
| | | (SEQ ID NO: 464) | | |
| CEP290-71 | + | GAACAAAAGCCAGGGACCAU | 20 | upstream |
| | | (SEQ ID NO: 465) | | |
| CEP290-72 | − | GAACUCUAUACCUUUUACUG | 20 | upstream |
| | | (SEQ ID NO: 466) | | |
| CEP290-73 | − | GAAGAAUGGAAUAGAUAAUA | 20 | downstream |
| | | (SEQ ID NO: 467) | | |
| CEP290-74 | + | GAAUAGUUUGUUCUGGGUAC | 20 | upstream |
| | | (SEQ ID NO: 468) | | |
| CEP290-75 | − | GAAUGGAAUAGAUAAUA | 17 | downstream |
| | | (SEQ ID NO: 469) | | |
| CEP290-76 | + | GAAUUUACAGAGUGCAUCCA | 20 | upstream |
| | | (SEQ ID NO: 470) | | |
| CEP290-77 | − | GAGAAAAAGGAGCAUGAAAC | 20 | upstream |
| | | (SEQ ID NO: 471) | | |
| CEP290-78 | − | GAGAGCCACAGUGCAUG | 17 | downstream |
| | | (SEQ ID NO: 472) | | |
| CEP290-79 | − | GAGGUAGAAUCAAGAAG | 17 | downstream |
| | | (SEQ ID NO: 473) | | |
| CEP290-80 | + | GAGUGCAUCCAUGGUCC | 17 | upstream |
| | | (SEQ ID NO: 474) | | |
| CEP290-81 | + | GAUAACUACAAAGGGUC | 17 | upstream |
| | | (SEQ ID NO: 475) | | |
| CEP290-82 | + | GAUAGAGACAGGAAUAA | 17 | downstream |
| | | (SEQ ID NO: 476) | | |
| CEP290-83 | + | GAUGAAAAAUACUCUUU | 17 | upstream |
| | | (SEQ ID NO: 477) | | |
| CEP290-84 | + | GAUGACAUGAGGUAAGU | 17 | downstream |
| | | (SEQ ID NO: 478) | | |
| CEP290-85 | + | GAUGCAGAACUAGUGUAGAC | 20 | downstream |
| | | (SEQ ID NO: 460) | | |
| CEP290-86 | + | GCAGAACUAGUGUAGAC | 17 | downstream |
| | | (SEQ ID NO: 458) | | |
| CEP290-87 | − | GCAUGUGGUGUCAAAUA | 17 | downstream |
| | | (SEQ ID NO: 479) | | |
| CEP290-88 | + | GCCUGAACAAGUUUUGAAAC | 20 | downstream |
| | | (SEQ ID NO: 480) | | |
| CEP290-89 | − | GCUACCGGUUACCUGAA | 17 | downstream |
| | | (SEQ ID NO: 457) | | |
| CEP290-90 | − | GCUCUUUUCUAUAUAUA | 17 | downstream |
| | | (SEQ ID NO: 481) | | |
| CEP290-91 | + | GCUUGAACUCUGUGCCAAAC | 20 | downstream |
| | | (SEQ ID NO: 461) | | |
| CEP290-92 | + | GCUUUUGACAGUUUUUAAGG | 20 | downstream |
| | | (SEQ ID NO: 482) | | |
| CEP290-93 | − | GCUUUUGUUCCUUGGAA | 17 | upstream |
| | | (SEQ ID NO: 483) | | |
| CEP290-94 | + | GGAACAAAAGCCAGGGACCA | 20 | upstream |
| | | (SEQ ID NO: 484) | | |
| CEP290-95 | + | GGACUUGACUUUUACCCUUC | 20 | downstream |
| | | (SEQ ID NO: 485) | | |
| CEP290-96 | + | GGAGAAUAGUUUGUUCU | 17 | upstream |
| | | (SEQ ID NO: 486) | | |
| CEP290-97 | + | GGAGUCACAUGGGAGUCACA | 20 | downstream |
| | | (SEQ ID NO: 487) | | |
| CEP290-98 | + | GGAUAGGACAGAGGACA | 17 | upstream |
| | | (SEQ ID NO: 488) | | |
| CEP290-99 | + | GGCUGUAAGAUAACUACAAA | 20 | upstream |
| | | (SEQ ID NO: 489) | | |
| CEP290-100 | + | GGGAGAAUAGUUUGUUC | 17 | upstream |
| | | (SEQ ID NO: 490) | | |
| CEP290-101 | + | GGGAGUCACAUGGGAGUCAC | 20 | downstream |
| | | (SEQ ID NO: 491) | | |
| CEP290-102 | − | GGGCUCUUCCUGGACCA | 17 | upstream |
| | | (SEQ ID NO: 492) | | |
| CEP290-103 | + | GGGUACAGGGGUAAGAGAAA | 20 | upstream |
| | | (SEQ ID NO: 493) | | |
| CEP290-104 | − | GGUCCCUGGCUUUUGUUCCU | 20 | upstream |
| | | (SEQ ID NO: 494) | | |
| CEP290-105 | − | GUAAAGGUUCAUGAGACUAG | 20 | downstream |
| | | (SEQ ID NO: 495) | | |
| CEP290-106 | + | GUAACAUAAUCACCUCUCUU | 20 | upstream |
| | | (SEQ ID NO: 496) | | |
| CEP290-107 | + | GUAAGACUGGAGAUAGAGAC | 20 | downstream |
| | | (SEQ ID NO: 497) | | |
| CEP290-108 | + | GUACAGGGGUAAGAGAA | 17 | upstream |
| | | (SEQ ID NO: 498) | | |
| CEP290-109 | + | GUAGCUUUUGACAGUUUUUA | 20 | downstream |
| | | (SEQ ID NO: 499) | | |
| CEP290-110 | + | GUCACAUGGGAGUCACA | 17 | downstream |
| | | (SEQ ID NO: 500) | | |
| CEP290-111 | − | GUGGAGAGCCACAGUGCAUG | 20 | downstream |
| | | (SEQ ID NO: 501) | | |
| CEP290-112 | − | GUUACAAUCUGUGAAUA | 17 | upstream |
| | | (SEQ ID NO: 502) | | |
| CEP290-113 | + | GUUCUGUCCUCAGUAAA | 17 | upstream |
| | | (SEQ ID NO: 503) | | |
| CEP290-114 | − | GUUGAGUAUCUCCUGUU | 17 | downstream |
| | | (SEQ ID NO: 459) | | |
| CEP290-115 | + | GUUUAGAAUGAUCAUUCUUG | 20 | downstream |
| | | (SEQ ID NO: 504) | | |
| CEP290-116 | + | GUUUGUUCUGGGUACAG | 17 | upstream |
| | | (SEQ ID NO: 505) | | |
| CEP290-117 | − | UAAAAACUGUCAAAAGCUAC | 20 | downstream |
| | | (SEQ ID NO: 506) | | |
| CEP290-118 | + | UAAAAGGUAUAGAGUUCAAG | 20 | upstream |
| | | (SEQ ID NO: 507) | | |
| CEP290-119 | + | UAAAUCAUGCAAGUGACCUA | 20 | upstream |
| | | (SEQ ID NO: 508) | | |
| CEP290-120 | + | UAAGAUAACUACAAAGGGUC | 20 | upstream |
| | | (SEQ ID NO: 509) | | |

[0915] Table 8B provides targeting domains for break-induced deletion of genomic sequence including the mutation at the LCA10 target position in the CEP290 gene selected according to the second tier parameters. The targeting domains are within 1000 bp upstream of an Alu repeat, within 40 bp upstream of mutation, or 1000 bp downstream of the mutation, have good orthogonality, and do not start with G. It is contemplated herein that the targeting domain hybridizes to the target domain through complementary base pairing. Any of the targeting domains in the table can be used with a S. pyogenes Cas9 molecule that generates a double stranded break (Cas9 nuclease) or a single-stranded break (Cas9 nickase).

TABLE 8B

| | | | Target | Position |
|---|---|---|---|---|
| | DNA | | Site | relative to |
| gRNA Name | Strand | Targeting Domain | Length | mutation |
| CEP290-121 | − | AAAAAGGAGCAUGAAAC | 17 | upstream |
| | | (SEQ ID NO: 1062) | | |
| CEP290-122 | + | AAAACUAAGACACUGCCAAU | 20 | downstream |
| | | (SEQ ID NO: 610) | | |
| CEP290-123 | + | AAAAGACUUAUAUUCCAUUA | 20 | downstream |
| | | (SEQ ID NO: 685) | | |
| CEP290-124 | − | AAAAGCUACCGGUUACCUGA | 20 | downstream |
| | | (SEQ ID NO: 621) | | |
| CEP290-125 | − | AAAAUUAUGCCUAUUUAGUG | 20 | upstream |
| | | (SEQ ID NO: 729) | | |
| CEP290-126 | + | AAACAACUGGAAGAGAGAAA | 20 | downstream |
| | | (SEQ ID NO: 691) | | |
| CEP290-127 | + | AAACUAAGACACUGCCAAUA | 20 | downstream |
| | | (SEQ ID NO: 609) | | |
| CEP290-128 | − | AAACUGUCAAAAGCUAC | 17 | downstream |
| | | (SEQ ID NO: 655) | | |
| CEP290-129 | − | AAAGAAAUAGAUGUAGAUUG | 20 | downstream |
| | | (SEQ ID NO: 1066) | | |
| CEP290-130 | + | AAAGAUGAAAAAUACUCUUU | 20 | upstream |
| | | (SEQ ID NO: 737) | | |
| CEP290-131 | − | AAAGCUACCGGUUACCUGAA | 20 | downstream |
| | | (SEQ ID NO: 620) | | |
| CEP290-133 | − | AAAUAGAGGCUUAUGGAUUU | 20 | upstream |
| | | (SEQ ID NO: 731) | | |
| CEP290-134 | + | AAAUUAUCACCACACUAAAU | 20 | upstream |
| | | (SEQ ID NO: 727) | | |
| CEP290-135 | − | AACAAACUAUUCUCCCA | 17 | upstream |
| | | (SEQ ID NO: 1070) | | |
| CEP290-136 | − | AACAGUAGCUGAAAUAUUAA | 20 | upstream |
| | | (SEQ ID NO: 1071) | | |
| CEP290-137 | + | AACAUGACUCAUAAUUUAGU | 20 | upstream |
| | | (SEQ ID NO: 721) | | |
| CEP290-138 | − | AACUAUUCUCCCAUGGUCCC | 20 | upstream |
| | | (SEQ ID NO: 1073) | | |
| CEP290-140 | + | AAGACACUGCCAAUAGGGAU | 20 | downstream |
| | | (SEQ ID NO: 600) | | |
| CEP290-141 | − | AAGGAAAUACAAAAACUGGA | 20 | downstream |
| | | (SEQ ID NO: 1074) | | |
| CEP290-142 | + | AAGGUAUAGAGUUCAAG | 17 | upstream |
| | | (SEQ ID NO: 1075) | | |
| CEP290-143 | − | AAGGUUCAUGAGACUAG | 17 | downstream |
| | | (SEQ ID NO: 1076) | | |
| CEP290-144 | + | AAUAGUUUGUUCUGGGUACA | 20 | upstream |
| | | (SEQ ID NO: 1077) | | |
| CEP290-145 | − | AAUAUAAGUCUUUUGAUAUA | 20 | downstream |
| | | (SEQ ID NO: 687) | | |
| CEP290-146 | − | AAUAUAUUAUCUAUUUAUAG | 20 | upstream |
| | | (SEQ ID NO: 1079) | | |
| CEP290-147 | − | AAUAUUGUAAUCAAAGG | 17 | upstream |
| | | (SEQ ID NO: 1080) | | |
| CEP290-148 | + | AAUAUUUCAGCUACUGU | 17 | upstream |
| | | (SEQ ID NO: 1081) | | |
| CEP290-149 | − | AAUUAUUGUUGCUUUUUGAG | 20 | downstream |
| | | (SEQ ID NO: 1082) | | |
| CEP290-150 | + | AAUUCACUGAGCAAAACAAC | 20 | downstream |
| | | (SEQ ID NO: 678) | | |
| CEP290-151 | + | ACAAAAGCCAGGGACCA | 17 | upstream |
| | | (SEQ ID NO: 1084) | | |
| CEP290-152 | + | ACACUGCCAAUAGGGAU | 17 | downstream |
| | | (SEQ ID NO: 595) | | |
| CEP290-153 | + | ACAGAGUGCAUCCAUGGUCC | 20 | upstream |
| | | (SEQ ID NO: 1085) | | |
| CEP290-154 | + | ACAUAAUCACCUCUCUU | 17 | upstream |
| | | (SEQ ID NO: 712) | | |
| CEP290-155 | − | ACCAGACAUCUAAGAGAAAA | 20 | upstream |
| | | (SEQ ID NO: 1087) | | |
| CEP290-156 | − | ACGUGCUCUUUUCUAUAUAU | 20 | downstream |
| | | (SEQ ID NO: 622) | | |
| CEP290-157 | + | ACUUUCUAAUGCUGGAG | 17 | upstream |
| | | (SEQ ID NO: 700) | | |
| CEP290-158 | + | ACUUUUACCCUUCAGGUAAC | 20 | downstream |
| | | (SEQ ID NO: 626) | | |
| CEP290-159 | − | AGAAUAUUGUAAUCAAAGGA | 20 | upstream |
| | | (SEQ ID NO: 1089) | | |
| CEP290-160 | − | AGACAUCUAAGAGAAAA | 17 | upstream |
| | | (SEQ ID NO: 1090) | | |
| CEP290-161 | + | AGACUUAUAUUCCAUUA | 17 | downstream |
| | | (SEQ ID NO: 651) | | |
| CEP290-162 | + | AGAGGAUAGGACAGAGGACA | 20 | upstream |
| | | (SEQ ID NO: 735) | | |
| CEP290-163 | + | AGAUGACAUGAGGUAAGUAG | 20 | downstream |
| | | (SEQ ID NO: 677) | | |
| CEP290-164 | + | AGAUGUCUGGUUAAAAG | 17 | upstream |
| | | (SEQ ID NO: 1093) | | |
| CEP290-165 | + | AGCCUCUAUUUCUGAUG | 17 | upstream |
| | | (SEQ ID NO: 709) | | |
| CEP290-166 | − | AGCUACCGGUUACCUGA | 17 | downstream |
| | | (SEQ ID NO: 618) | | |
| CEP290-167 | − | AGCUCAAAAGCUUUUGC | 17 | upstream |
| | | (SEQ ID NO: 698) | | |
| CEP290-168 | − | AGGAAAUACAAAAACUGGAU | 20 | downstream |
| | | (SEQ ID NO: 1096) | | |
| CEP290-169 | + | AGGAAGAUGAACAAAUC | 17 | upstream |
| | | (SEQ ID NO: 717) | | |
| CEP290-170 | + | AGGACAGAGGACAUGGAGAA | 20 | upstream |
| | | (SEQ ID NO: 736) | | |
| CEP290-171 | + | AGGACUUUCUAAUGCUGGAG | 20 | upstream |
| | | (SEQ ID NO: 719) | | |
| CEP290-172 | − | AGGCAAGAGACAUCUUG | 17 | upstream |
| | | (SEQ ID NO: 708) | | |
| CEP290-173 | − | AGGUAGAAUAUUGUAAUCAA | 20 | upstream |
| | | (SEQ ID NO: 1101) | | |
| CEP290-174 | − | AGUAGCUGAAAUAUUAA | 17 | upstream |
| | | (SEQ ID NO: 1102) | | |
| CEP290-175 | + | AGUCACAUGGGAGUCAC | 17 | downstream |
| | | (SEQ ID NO: 644) | | |
| CEP290-176 | − | AGUGCAUGUGGUGUCAAAUA | 20 | downstream |
| | | (SEQ ID NO: 627) | | |
| CEP290-177 | + | AGUUUGUUCUGGGUACA | 17 | upstream |
| | | (SEQ ID NO: 1103) | | |
| CEP290-178 | + | AUAAGCCUCUAUUUCUGAUG | 20 | upstream |
| | | (SEQ ID NO: 723) | | |
| CEP290-179 | − | AUAAGUCUUUUGAUAUA | 17 | downstream |
| | | (SEQ ID NO: 661) | | |
| CEP290-180 | + | AUACAUAAGAAAGAACACUG | 20 | downstream |
| | | (SEQ ID NO: 686) | | |
| CEP290-181 | + | AUAGUUUGUUCUGGGUACAG | 20 | upstream |
| | | (SEQ ID NO: 1107) | | |
| CEP290-182 | − | AUAUCUGUCUUCCUUAA | 17 | downstream |
| | | (SEQ ID NO: 658) | | |
| CEP290-183 | − | AUAUUAAGGGCUCUUCC | 17 | upstream |
| | | (SEQ ID NO: 1109) | | |
| CEP290-184 | − | AUAUUGUAAUCAAAGGA | 17 | upstream |
| | | (SEQ ID NO: 1110) | | |
| CEP290-185 | + | AUCAUGCAAGUGACCUA | 17 | upstream |
| | | (SEQ ID NO: 1111) | | |
| CEP290-186 | − | AUCUAAGAUCCUUUCAC | 17 | upstream |
| | | (SEQ ID NO: 696) | | |
| CEP290-187 | − | AUCUUCCUCAUCAGAAAUAG | 20 | upstream |
| | | (SEQ ID NO: 722) | | |
| CEP290-188 | + | AUGACAUGAGGUAAGUA | 17 | downstream |
| | | (SEQ ID NO: 656) | | |
| CEP290-189 | + | AUGACUCAUAAUUUAGU | 17 | upstream |
| | | (SEQ ID NO: 704) | | |
| CEP290-190 | − | AUGAGAGUGAUUAGUGG | 17 | downstream |
| | | (SEQ ID NO: 645) | | |
| CEP290-191 | + | AUGAGGAAGAUGAACAAAUC | 20 | upstream |
| | | (SEQ ID NO: 733) | | |
| CEP290-192 | + | AUGGGAGAAUAGUUUGUUCU | 20 | upstream |
| | | (SEQ ID NO: 1116) | | |
| CEP290-193 | − | AUUAGCUCAAAAGCUUUUGC | 20 | upstream |
| | | (SEQ ID NO: 633) | | |
| CEP290-194 | − | AUUAUGCCUAUUUAGUG | 17 | upstream |
| | | (SEQ ID NO: 703) | | |
| CEP290-195 | + | AUUCCAAGGAACAAAAGCCA | 20 | upstream |
| | | (SEQ ID NO: 1118) | | |
| CEP290-196 | − | AUUGAGGUAGAAUCAAGAAG | 20 | downstream |
| | | (SEQ ID NO: 1119) | | |
| CEP290-197 | + | AUUUGACACCACAUGCACUG | 20 | downstream |
| | | (SEQ ID NO: 623) | | |
| CEP290-198 | + | CAAAAGCCAGGGACCAU | 17 | upstream |
| | | (SEQ ID NO: 1120) | | |
| CEP290-199 | − | CAACAGUAGCUGAAAUAUUA | 20 | upstream |
| | | (SEQ ID NO: 1121) | | |
| CEP290-200 | + | CAAGAUGUCUCUUGCCU | 17 | upstream |
| | | (SEQ ID NO: 702) | | |
| CEP290-201 | − | CAGAACAAACUAUUCUCCCA | 20 | upstream |
| | | (SEQ ID NO: 1123) | | |
| CEP290-202 | − | CAGAUUUCAUGUGUGAAGAA | 20 | downstream |
| | | (SEQ ID NO: 1124) | | |
| CEP290-204 | − | CAGCAUUAGAAAGUCCU | 17 | upstream |
| | | (SEQ ID NO: 710) | | |
| CEP290-205 | + | CAGGGGUAAGAGAAAGGGAU | 20 | upstream |
| | | (SEQ ID NO: 1126) | | |
| CEP290-206 | + | CAGUAAGGAGGAUGUAAGAC | 20 | downstream |
| | | (SEQ ID NO: 676) | | |
| CEP290-207 | − | CAGUAGCUGAAAUAUUA | 17 | upstream |
| | | (SEQ ID NO: 1128) | | |
| CEP290-208 | + | CAUAAGAAAGAACACUG | 17 | downstream |
| | | (SEQ ID NO: 665) | | |
| CEP290-209 | + | CAUGGGAGAAUAGUUUGUUC | 20 | upstream |
| | | (SEQ ID NO: 1130) | | |
| CEP290-210 | + | CAUGGGAGUCACAGGGU | 17 | downstream |
| | | (SEQ ID NO: 652) | | |
| CEP290-211 | + | CAUUCCAAGGAACAAAAGCC | 20 | upstream |
| | | (SEQ ID NO: 1131) | | |
| CEP290-212 | + | CCACAAGAUGUCUCUUGCCU | 20 | upstream |
| | | (SEQ ID NO: 630) | | |
| CEP290-213 | − | CCUAGGCAAGAGACAUCUUG | 20 | upstream |
| | | (SEQ ID NO: 631) | | |
| CEP290-214 | − | CGUGCUCUUUUCUAUAUAUA | 20 | downstream |
| | | (SEQ ID NO: 624) | | |
| CEP290-215 | − | CGUUGUUCUGAGUAGCUUUC | 20 | upstream |
| | | (SEQ ID NO: 629) | | |
| CEP290-216 | + | CUAAGACACUGCCAAUA | 17 | downstream |
| | | (SEQ ID NO: 597) | | |
| CEP290-217 | + | CUAAUGCUGGAGAGGAU | 17 | upstream |
| | | (SEQ ID NO: 707) | | |
| CEP290-218 | + | CUAGAUGACAUGAGGUAAGU | 20 | downstream |
| | | (SEQ ID NO: 671) | | |
| CEP290-219 | + | CUAGGACUUUCUAAUGC | 17 | upstream |
| | | (SEQ ID NO: 695) | | |
| CEP290-220 | − | CUCAUACCUAUCCCUAU | 17 | downstream |
| | | (SEQ ID NO: 594) | | |
| CEP290-221 | − | CUCCAGCAUUAGAAAGUCCU | 20 | upstream |
| | | (SEQ ID NO: 720) | | |
| CEP290-222 | − | CUCUAUACCUUUUACUG | 17 | upstream |
| | | (SEQ ID NO: 701) | | |
| CEP290-223 | + | CUCUUGCUCUAGAUGACAUG | 20 | downstream |
| | | (SEQ ID NO: 675) | | |
| CEP290-224 | − | CUGCUGCUUUUGCCAAAGAG | 20 | upstream |
| | | (SEQ ID NO: 725) | | |
| CEP290-225 | − | CUGCUUUUGCCAAAGAG | 17 | upstream |
| | | (SEQ ID NO: 711) | | |
| CEP290-226 | − | CUGGCUUUUGUUCCUUGGAA | 20 | upstream |
| | | (SEQ ID NO: 1140) | | |
| CEP290-227 | + | CUGUAAGAUAACUACAA | 17 | upstream |
| | | (SEQ ID NO: 1141) | | |
| CEP290-228 | − | CUUAAGCAUACUUUUUUUAA | 20 | downstream |
| | | (SEQ ID NO: 690) | | |
| CEP290-229 | + | CUUAAUAUUUCAGCUACUGU | 20 | upstream |
| | | (SEQ ID NO: 1143) | | |
| CEP290-231 | + | CUUAGAUGUCUGGUUAAAAG | 20 | upstream |
| | | (SEQ ID NO: 1144) | | |
| CEP290-232 | − | CUUAUCUAAGAUCCUUUCAC | 20 | upstream |
| | | (SEQ ID NO: 734) | | |
| CEP290-233 | + | CUUGACUUUUACCCUUC | 17 | downstream |
| | | (SEQ ID NO: 649) | | |
| CEP290-234 | + | CUUGUUCUGUCCUCAGUAAA | 20 | upstream |
| | | (SEQ ID NO: 728) | | |
| CEP290-235 | + | CUUUUGACAGUUUUUAAGGC | 20 | downstream |
| | | (SEQ ID NO: 684) | | |

[0916] Table 8C provides targeting domains for break-induced deletion of genomic sequence including the mutation at the LCA10 target position in the CEP290 gene selected according to the third tier parameters. The targeting domains are within 1000 bp upstream of an Alu repeat, within 40 bp upstream of mutation, or 1000 bp downstream of the mutation, and start with G. It is contemplated herein that the targeting domain hybridizes to the target domain through complementary base pairing. Any of the targeting domains in the table can be used with a S. pyogenes Cas9 molecule that generates a double stranded break (Cas9 nuclease) or a single-stranded break (Cas9 nickase).

TABLE 8C

| | | | Target | Position |
|---|---|---|---|---|
| | DNA | | Site | relative to |
| gRNA Name | Strand | Targeting Domain | Length | mutation |
| CEP290-236 | − | GAAAUACAAAAACUGGA | 17 | downstream |
| | | (SEQ ID NO: 1148) | | |
| CEP290-237 | + | GCUUUUGACAGUUUUUA | 17 | downstream |
| | | (SEQ ID NO: 634) | | |
| CEP290-238 | + | GGAGAUAGAGACAGGAAUAA | 20 | downstream |
| | | (SEQ ID NO: 635) | | |
| CEP290-239 | − | GGAGUGCAGUGGAGUGAUCU | 20 | downstream |
| | | (SEQ ID NO: 1149) | | |
| CEP290-240 | + | GGGGUAAGAGAAAGGGA | 17 | upstream |
| | | (SEQ ID NO: 1150) | | |
| CEP290-241 | + | GGGUAAGAGAAAGGGAU | 17 | upstream |
| | | (SEQ ID NO: 1151) | | |
| CEP290-242 | − | GUCUCACUGUGUUGCCC | 17 | downstream |
| | | (SEQ ID NO: 1152) | | |
| CEP290-243 | − | GUGCAGUGGAGUGAUCU | 17 | downstream |
| | | (SEQ ID NO: 1153) | | |
| CEP290-244 | + | GUGUGUGUGUGUGUGUUAUG | 20 | upstream |
| | | (SEQ ID NO: 1154) | | |
| CEP290-245 | + | GUGUGUGUGUGUUAUGU | 17 | upstream |
| | | (SEQ ID NO: 1155) | | |

[0917] Table 8D provides targeting domains for break-induced deletion of genomic sequence including the mutation at the LCA10 target position in the CEP290 gene selected according to the fourth tier parameters. The targeting domains are within 1000 bp upstream of an Alu repeat, within 40 bp upstream of mutation, or 1000 bp downstream of the mutation, and do not start with G. It is contemplated herein that the targeting domain hybridizes to the target domain through complementary base pairing. Any of the targeting domains in the table can be used with a S. pyogenes Cas9 molecule that generates a double stranded break (Cas9 nuclease) or a single-stranded break (Cas9 nickase).

TABLE 8D

| | | | Target | Position |
|---|---|---|---|---|
| | DNA | | Site | relative to |
| gRNA Name | Strand | Targeting Domain | Length | mutation |
| CEP290-246 | − | AAAUACAAAAACUGGAU | 17 | downstream |
| | | (SEQ ID NO: 1156) | | |
| CEP290-247 | − | AAGCAUACUUUUUUUAA | 17 | downstream |
| | | (SEQ ID NO: 667) | | |
| CEP290-248 | + | AAGGCGGGGAGUCACAU | 17 | downstream |
| | | (SEQ ID NO: 636) | | |
| CEP290-249 | + | AAGUAUGCUUAAGAAAAAAA | 20 | downstream |
| | | (SEQ ID NO: 693) | | |
| CEP290-250 | + | ACAGAGGACAUGGAGAA | 17 | upstream |
| | | (SEQ ID NO: 715) | | |
| CEP290-251 | + | ACAGGGGUAAGAGAAAGGGA | 20 | upstream |
| | | (SEQ ID NO: 1160) | | |
| CEP290-253 | + | ACUAAGACACUGCCAAU | 17 | downstream |
| | | (SEQ ID NO: 603) | | |
| CEP290-254 | + | ACUCCACUGCACUCCAGCCU | 20 | downstream |
| | | (SEQ ID NO: 1161) | | |
| CEP290-255 | + | AGACUGGAGAUAGAGAC | 17 | downstream |
| | | (SEQ ID NO: 664) | | |
| CEP290-256 | − | AGAGUCUCACUGUGUUGCCC | 20 | downstream |
| | | (SEQ ID NO: 1163) | | |
| CEP290-257 | + | AGAUGAAAAAUACUCUU | 17 | upstream |
| | | (SEQ ID NO: 718) | | |
| CEP290-258 | − | AUAUUAUCUAUUUAUAG | 17 | upstream |
| | | (SEQ ID NO: 1165) | | |
| CEP290-259 | − | AUUUCAUGUGUGAAGAA | 17 | downstream |
| | | (SEQ ID NO: 1166) | | |
| CEP290-260 | − | AUUUUUUAUUAUCUUUAUUG | 20 | downstream |
| | | (SEQ ID NO: 694) | | |
| CEP290-261 | + | CAACUGGAAGAGAGAAA | 17 | downstream |
| | | (SEQ ID NO: 668) | | |
| CEP290-262 | + | CACUCCACUGCACUCCAGCC | 20 | downstream |
| | | (SEQ ID NO: 1169) | | |
| CEP290-263 | − | CACUGUGUUGCCCAGGC | 17 | downstream |
| | | (SEQ ID NO: 1170) | | |
| CEP290-264 | + | CCAAGGAACAAAAGCCA | 17 | upstream |
| | | (SEQ ID NO: 1171) | | |
| CEP290-265 | + | CCACUGCACUCCAGCCU | 17 | downstream |
| | | (SEQ ID NO: 1172) | | |
| CEP290-266 | − | CCCAGGCUGGAGUGCAG | 17 | downstream |
| | | (SEQ ID NO: 1173) | | |
| CEP290-267 | − | CCCUGGCUUUUGUUCCU | 17 | upstream |
| | | (SEQ ID NO: 1174) | | |
| CEP290-268 | + | CGCUUGAACCUGGGAGGCAG | 20 | downstream |
| | | (SEQ ID NO: 1175) | | |
| CEP290-269 | − | UAAGGAAAUACAAAAAC | 17 | downstream |
| | | (SEQ ID NO: 1176) | | |
| CEP290-270 | − | UAAUAAGGAAAUACAAAAAC | 20 | downstream |
| | | (SEQ ID NO: 1177) | | |
| CEP290-271 | − | UACUGCAACCUCUGCCUCCC | 20 | downstream |
| | | (SEQ ID NO: 1178) | | |
| CEP290-272 | + | UAUGCUUAAGAAAAAAA | 17 | downstream |
| | | (SEQ ID NO: 669) | | |
| CEP290-273 | + | UCAUUCUUGUGGCAGUAAGG | 20 | downstream |
| | | (SEQ ID NO: 692) | | |
| CEP290-274 | + | UCCACUGCACUCCAGCC | 17 | downstream |
| | | (SEQ ID NO: 1181) | | |
| CEP290-275 | − | UCUCACUGUGUUGCCCAGGC | 20 | downstream |
| | | (SEQ ID NO: 1182) | | |
| CEP290-276 | + | UGAACAAGUUUUGAAAC | 17 | downstream |
| | | (SEQ ID NO: 659) | | |
| CEP290-277 | − | UGCAACCUCUGCCUCCC | 17 | downstream |
| | | (SEQ ID NO: 1184) | | |
| CEP290-278 | + | UGUGUGUGUGUGUGUUAUGU | 20 | upstream |
| | | (SEQ ID NO: 1185) | | |
| CEP290-279 | + | UGUGUGUGUGUGUUAUG | 17 | upstream |
| | | (SEQ ID NO: 1186) | | |
| CEP290-280 | + | UUCUUGUGGCAGUAAGG | 17 | downstream |
| | | (SEQ ID NO: 666) | | |
| CEP290-281 | + | UUGAACCUGGGAGGCAG | 17 | downstream |
| | | (SEQ ID NO: 1188) | | |
| CEP290-282 | − | UUGCCCAGGCUGGAGUGCAG | 20 | downstream |
| | | (SEQ ID NO: 1189) | | |
| CEP290-283 | − | UUUUAUUAUCUUUAUUG | 17 | downstream |
| | | (SEQ ID NO: 670) | | |

[0918] Table 9A provides targeting domains for break-induced deletion of genomic sequence including the mutation at the LCA10 target position in the CEP290 gene selected according to the first tier parameters. The targeting domains are within 1000 bp upstream of an Alu repeat, within 40 bp upstream of mutation, or 1000 bp downstream of the mutation, have good orthogonality, start with G and PAM is NNGRRT. It is contemplated herein that the targeting domain hybridizes to the target domain through complementary base pairing. Any of the targeting domains in the table can be used with a S. aureus Cas9 molecule that generates a double stranded break (Cas9 nuclease) or a single-stranded break (Cas9 nickase).

TABLE 9A
1st Tier

| | | | Target | Position |
|---|---|---|---|---|
| | DNA | | Site | relative to |
| gRNA Name | Strand | Targeting Domain | Length | mutation |
| CEP290-284 | + | GCUAAAUCAUGCAAGUGACCUAAG | 24 | upstream |
| | | (SEQ ID NO: 511) | | |
| CEP290-487 | − | GGUCACUUGCAUGAUUUAG | 19 | upstream |
| | | (SEQ ID NO: 512) | | |
| CEP290-486 | − | GUCACUUGCAUGAUUUAG | 18 | upstream |
| | | (SEQ ID NO: 513) | | |
| CEP290-285 | + | GCCUAGGACUUUCUAAUGCUGGA | 23 | upstream |
| | | (SEQ ID NO: 514) | | |
| CEP290-479 | + | GGACUUUCUAAUGCUGGA | 18 | upstream |
| | | (SEQ ID NO: 515) | | |
| CEP290-286 | + | GGGACCAUGGGAGAAUAGUUUGUU | 24 | upstream |
| | | (SEQ ID NO: 516) | | |
| CEP290-287 | + | GGACCAUGGGAGAAUAGUUUGUU | 23 | upstream |
| | | (SEQ ID NO: 517) | | |
| CEP290-288 | + | GACCAUGGGAGAAUAGUUUGUU | 22 | upstream |
| | | (SEQ ID NO: 518) | | |
| CEP290-289 | − | GGUCCCUGGCUUUUGUUCCUUGGA | 24 | upstream |
| | | (SEQ ID NO: 519) | | |
| CEP290-290 | − | GUCCCUGGCUUUUGUUCCUUGGA | 23 | upstream |
| | | (SEQ ID NO: 520) | | |
| CEP290-374 | − | GAAAACGUUGUUCUGAGUAGCUUU | 24 | upstream |
| | | (SEQ ID NO: 521) | | |
| CEP290-478 | − | GUUGUUCUGAGUAGCUUU | 18 | upstream |
| | | (SEQ ID NO: 522) | | |
| CEP290-489 | − | GGUCCCUGGCUUUUGUUCCU | 20 | upstream |
| | | (SEQ ID NO: 494) | | |
| CEP290-488 | − | GUCCCUGGCUUUUGUUCCU | 19 | upstream |
| | | (SEQ ID NO: 523) | | |
| CEP290-291 | − | GACAUCUUGUGGAUAAUGUAUCA | 23 | upstream |
| | | (SEQ ID NO: 524) | | |
| CEP290-292 | − | GUCCUAGGCAAGAGACAUCUU | 21 | upstream |
| | | (SEQ ID NO: 525) | | |
| CEP290-293 | + | GCCAGCAAAAGCUUUUGAGCUAA | 23 | upstream |
| | | (SEQ ID NO: 526) | | |
| CEP290-481 | + | GCAAAAGCUUUUGAGCUAA | 19 | upstream |
| | | (SEQ ID NO: 527) | | |
| CEP290-294 | + | GAUCUUAUUCUACUCCUGUGA | 21 | upstream |
| | | (SEQ ID NO: 528) | | |
| CEP290-295 | − | GCUUUCAGGAUUCCUACUAAAUU | 23 | upstream |
| | | (SEQ ID NO: 529) | | |
| CEP290-323 | + | GUUCUGUCCUCAGUAAAAGGUA | 22 | upstream |
| | | (SEQ ID NO: 530) | | |
| CEP290-480 | + | GAACAACGUUUUCAUUUA | 18 | upstream |
| | | (SEQ ID NO: 531) | | |
| CEP290-296 | − | GUAGAAUAUCAUAAGUUACAAUCU | 24 | upstream |
| | | (SEQ ID NO: 532) | | |
| CEP290-297 | − | GAAUAUCAUAAGUUACAAUCU | 21 | upstream |
| | | (SEQ ID NO: 533) | | |
| CEP290-298 | + | GUGGCUGUAAGAUAACUACA | 20 | upstream |
| | | (SEQ ID NO: 534) | | |
| CEP290-299 | + | GGCUGUAAGAUAACUACA | 18 | upstream |
| | | (SEQ ID NO: 535) | | |
| CEP290-300 | − | GUUUAACGUUAUCAUUUUCCCA | 22 | upstream |
| | | (SEQ ID NO: 536) | | |
| CEP290-301 | + | GUAAGAGAAAGGGAUGGGCACUUA | 24 | upstream |
| | | (SEQ ID NO: 537) | | |
| CEP290-492 | + | GAGAAAGGGAUGGGCACUUA | 20 | upstream |
| | | (SEQ ID NO: 538) | | |
| CEP290-491 | + | GAAAGGGAUGGGCACUUA | 18 | upstream |
| | | (SEQ ID NO: 539) | | |
| CEP290-483 | − | GUAAAUGAAAACGUUGUU | 18 | upstream |
| | | (SEQ ID NO: 540) | | |
| CEP290-302 | + | GAUAAACAUGACUCAUAAUUUAGU | 24 | upstream |
| | | (SEQ ID NO: 541) | | |
| CEP290-303 | + | GGAACAAAAGCCAGGGACCAUGG | 23 | upstream |
| | | (SEQ ID NO: 542) | | |
| CEP290-304 | + | GAACAAAAGCCAGGGACCAUGG | 22 | upstream |
| | | (SEQ ID NO: 543) | | |
| CEP290-305 | + | GGGAGAAUAGUUUGUUCUGGGUAC | 24 | upstream |
| | | (SEQ ID NO: 544) | | |
| CEP290-306 | + | GGAGAAUAGUUUGUUCUGGGUAC | 23 | upstream |
| | | (SEQ ID NO: 545) | | |
| CEP290-307 | + | GAGAAUAGUUUGUUCUGGGUAC | 22 | upstream |
| | | (SEQ ID NO: 546) | | |
| CEP290-490 | + | GAAUAGUUUGUUCUGGGUAC | 20 | upstream |
| | | (SEQ ID NO: 468) | | |
| CEP290-482 | − | GAAAUAGAGGCUUAUGGAUU | 20 | upstream |
| | | (SEQ ID NO: 547) | | |
| CEP290-308 | + | GUUCUGGGUACAGGGGUAAGAGAA | 24 | upstream |
| | | (SEQ ID NO: 548) | | |
| CEP290-494 | + | GGGUACAGGGGUAAGAGAA | 19 | upstream |
| | | (SEQ ID NO: 549) | | |
| CEP290-493 | + | GGUACAGGGGUAAGAGAA | 18 | upstream |
| | | (SEQ ID NO: 550) | | |
| CEP290-309 | − | GUAAAUUCUCAUCAUUUUUUAUUG | 24 | upstream |
| | | (SEQ ID NO: 551) | | |
| CEP290-310 | + | GGAGAGGAUAGGACAGAGGACAUG | 24 | upstream |
| | | (SEQ ID NO: 552) | | |
| CEP290-311 | + | GAGAGGAUAGGACAGAGGACAUG | 23 | upstream |
| | | (SEQ ID NO: 553) | | |
| CEP290-313 | + | GAGGAUAGGACAGAGGACAUG | 21 | upstream |
| | | (SEQ ID NO: 554) | | |
| CEP290-485 | + | GGAUAGGACAGAGGACAUG | 19 | upstream |
| | | (SEQ ID NO: 555) | | |
| CEP290-484 | + | GAUAGGACAGAGGACAUG | 18 | upstream |
| | | (SEQ ID NO: 556) | | |
| CEP290-314 | − | GAAUAAAUGUAGAAUUUUAAUG | 22 | upstream |
| | | (SEQ ID NO: 557) | | |
| CEP290-64 | − | GUCAAAAGCUACCGGUUACCUG | 22 | downstream |
| | | (SEQ ID NO: 558) | | |
| CEP290-315 | + | GUUUUUAAGGCGGGGAGUCACAU | 23 | downstream |
| | | (SEQ ID NO: 559) | | |
| CEP290-203 | − | GUCUUACAUCCUCCUUACUGCCAC | 24 | downstream |
| | | (SEQ ID NO: 560) | | |
| CEP290-316 | + | GAGUCACAGGGUAGGAUUCAUGUU | 24 | downstream |
| | | (SEQ ID NO: 561) | | |
| CEP290-317 | + | GUCACAGGGUAGGAUUCAUGUU | 22 | downstream |
| | | (SEQ ID NO: 562) | | |
| CEP290-318 | − | GGCACAGAGUUCAAGCUAAUACAU | 24 | downstream |
| | | (SEQ ID NO: 563) | | |
| CEP290-319 | − | GCACAGAGUUCAAGCUAAUACAU | 23 | downstream |
| | | (SEQ ID NO: 564) | | |
| CEP290-505 | − | GAGUUCAAGCUAAUACAU | 18 | downstream |
| | | (SEQ ID NO: 565) | | |
| CEP290-496 | + | GAUGCAGAACUAGUGUAGAC | 20 | downstream |
| | | (SEQ ID NO: 460) | | |
| CEP290-320 | − | GUGUUGAGUAUCUCCUGUUUGGCA | 24 | downstream |
| | | (SEQ ID NO: 566) | | |
| CEP290-321 | − | GUUGAGUAUCUCCUGUUUGGCA | 22 | downstream |
| | | (SEQ ID NO: 567) | | |
| CEP290-504 | − | GAGUAUCUCCUGUUUGGCA | 19 | downstream |
| | | (SEQ ID NO: 568) | | |
| CEP290-322 | − | GAAAAUCAGAUUUCAUGUGUG | 21 | downstream |
| | | (SEQ ID NO: 569) | | |
| CEP290-324 | − | GCCACAAGAAUGAUCAUUCUAAAC | 24 | downstream |
| | | (SEQ ID NO: 570) | | |
| CEP290-325 | + | GGCGGGGAGUCACAUGGGAGUCA | 23 | downstream |
| | | (SEQ ID NO: 571) | | |
| CEP290-326 | + | GCGGGGAGUCACAUGGGAGUCA | 22 | downstream |
| | | (SEQ ID NO: 572) | | |
| CEP290-499 | + | GGGGAGUCACAUGGGAGUCA | 20 | downstream |
| | | (SEQ ID NO: 573) | | |
| CEP290-498 | + | GGGAGUCACAUGGGAGUCA | 19 | downstream |
| | | (SEQ ID NO: 574) | | |
| CEP290-497 | + | GGAGUCACAUGGGAGUCA | 18 | downstream |
| | | (SEQ ID NO: 575) | | |
| CEP290-327 | + | GCUUUUGACAGUUUUUAAGGCG | 22 | downstream |
| | | (SEQ ID NO: 576) | | |
| CEP290-328 | + | GAUCAUUCUUGUGGCAGUAAG | 21 | downstream |
| | | (SEQ ID NO: 577) | | |
| CEP290-329 | − | GAGCAAGAGAUGAACUAG | 18 | downstream |
| | | (SEQ ID NO: 578) | | |
| CEP290-500 | + | GCCUGAACAAGUUUUGAAAC | 20 | downstream |
| | | (SEQ ID NO: 480) | | |
| CEP290-330 | − | GUAGAUUGAGGUAGAAUCAAGAA | 23 | downstream |
| | | (SEQ ID NO: 579) | | |
| CEP290-506 | − | GAUUGAGGUAGAAUCAAGAA | 20 | downstream |
| | | (SEQ ID NO: 580) | | |
| CEP290-331 | + | GGAUGUAAGACUGGAGAUAGAGAC | 24 | downstream |
| | | (SEQ ID NO: 581) | | |
| CEP290-332 | + | GAUGUAAGACUGGAGAUAGAGAC | 23 | downstream |
| | | (SEQ ID NO: 582) | | |
| CEP290-503 | + | GUAAGACUGGAGAUAGAGAC | 20 | downstream |
| | | (SEQ ID NO: 497) | | |
| CEP290-333 | + | GGGAGUCACAUGGGAGUCACAGGG | 24 | downstream |
| | | (SEQ ID NO: 583) | | |
| CEP290-334 | + | GGAGUCACAUGGGAGUCACAGGG | 23 | downstream |
| | | (SEQ ID NO: 584) | | |
| CEP290-335 | + | GAGUCACAUGGGAGUCACAGGG | 22 | downstream |
| | | (SEQ ID NO: 585) | | |
| CEP290-502 | + | GUCACAUGGGAGUCACAGGG | 20 | downstream |
| | | (SEQ ID NO: 586) | | |
| CEP290-336 | − | GUUUACAUAUCUGUCUUCCUUAA | 23 | downstream |
| | | (SEQ ID NO: 587) | | |
| CEP290-507 | − | GAUUUCAUGUGUGAAGAA | 18 | downstream |
| | | (SEQ ID NO: 588) | | |

[0919] Table 9B provides targeting domains for break-induced deletion of genomic sequence including the mutation at the LCA10 target position in the CEP290 gene selected according to the second tier parameters. The targeting domains are within 1000 bp upstream of an Alu repeat, within 40 bp upstream of mutation, or 1000 bp downstream of the mutation, and have good orthogonality. It is contemplated herein that the targeting domain hybridizes to the target domain through complementary base pairing. Any of the targeting domains in the table can be used with a S. aureus Cas9 molecule that generates a double stranded break (Cas9 nuclease) or a single-stranded break (Cas9 nickase).

TABLE 9B

| | | | Target | Position |
|---|---|---|---|---|
| | DNA | | Site | relative to |
| gRNA Name | Strand | Targeting Domain | Length | mutation |
| CEP290-337 | + | AAAUCAUGCAAGUGACCUAAG | 21 | upstream |
| | | (SEQ ID NO: 1191) | | |
| CEP290-338 | + | AAUCAUGCAAGUGACCUAAG | 20 | upstream |
| | | (SEQ ID NO: 1192) | | |
| CEP290-339 | + | AUCAUGCAAGUGACCUAAG | 19 | upstream |
| | | (SEQ ID NO: 1193) | | |
| CEP290-340 | - | AGGUCACUUGCAUGAUUUAG | 20 | upstream |
| | | (SEQ ID NO: 1194) | | |
| CEP290-341 | - | AAUAUUAAGGGCUCUUCCUGGACC | 24 | upstream |
| | | (SEQ ID NO: 1195) | | |
| CEP290-342 | - | AUAUUAAGGGCUCUUCCUGGACC | 23 | upstream |
| | | (SEQ ID NO: 1196) | | |
| CEP290-343 | - | AUUAAGGGCUCUUCCUGGACC | 21 | upstream |
| | | (SEQ ID NO: 1197) | | |
| CEP290-344 | - | AAGGGCUCUUCCUGGACC | 18 | upstream |
| | | (SEQ ID NO: 1198) | | |
| CEP290-345 | + | AGGACUUUCUAAUGCUGGA | 19 | upstream |
| | | (SEQ ID NO: 1199) | | |
| CEP290-346 | + | ACCAUGGGAGAAUAGUUUGUU | 21 | upstream |
| | | (SEQ ID NO: 1200) | | |
| CEP290-347 | + | AUGGGAGAAUAGUUUGUU | 18 | upstream |
| | | (SEQ ID NO: 1201) | | |
| CEP290-348 | + | ACUCCUGUGAAAGGAUCUUAGAU | 23 | upstream |
| | | (SEQ ID NO: 1202) | | |
| CEP290-349 | - | AAAACGUUGUUCUGAGUAGCUUU | 23 | upstream |
| | | (SEQ ID NO: 1203) | | |
| CEP290-350 | - | AAACGUUGUUCUGAGUAGCUUU | 22 | upstream |
| | | (SEQ ID NO: 1204) | | |
| CEP290-351 | - | AACGUUGUUCUGAGUAGCUUU | 21 | upstream |
| | | (SEQ ID NO: 1205) | | |
| CEP290-352 | - | ACGUUGUUCUGAGUAGCUUU | 20 | upstream |
| | | (SEQ ID NO: 749) | | |
| CEP290-353 | - | AUUUAUAGUGGCUGAAUGACUU | 22 | upstream |
| | | (SEQ ID NO: 1207) | | |
| CEP290-354 | - | AUAGUGGCUGAAUGACUU | 18 | upstream |
| | | (SEQ ID NO: 1208) | | |
| CEP290-355 | - | AUGGUCCCUGGCUUUUGUUCCU | 22 | upstream |
| | | (SEQ ID NO: 1209) | | |
| CEP290-356 | - | AGACAUCUUGUGGAUAAUGUAUCA | 24 | upstream |
| | | (SEQ ID NO: 1210) | | |
| CEP290-357 | - | ACAUCUUGUGGAUAAUGUAUCA | 22 | upstream |
| | | (SEQ ID NO: 1211) | | |
| CEP290-358 | - | AUCUUGUGGAUAAUGUAUCA | 20 | upstream |
| | | (SEQ ID NO: 835) | | |
| CEP290-359 | - | AAAGUCCUAGGCAAGAGACAUCUU | 24 | upstream |
| | | (SEQ ID NO: 1213) | | |
| CEP290-360 | - | AAGUCCUAGGCAAGAGACAUCUU | 23 | upstream |
| | | (SEQ ID NO: 1214) | | |
| CEP290-361 | - | AGUCCUAGGCAAGAGACAUCUU | 22 | upstream |
| | | (SEQ ID NO: 1215) | | |
| CEP290-362 | + | AGCCAGCAAAAGCUUUUGAGCUAA | 24 | upstream |
| | | (SEQ ID NO: 1216) | | |
| CEP290-363 | + | AGCAAAAGCUUUUGAGCUAA | 20 | upstream |
| | | (SEQ ID NO: 763) | | |
| CEP290-364 | + | AGAUCUUAUUCUACUCCUGUGA | 22 | upstream |
| | | (SEQ ID NO: 1218) | | |
| CEP290-365 | + | AUCUUAUUCUACUCCUGUGA | 20 | upstream |
| | | (SEQ ID NO: 764) | | |
| CEP290-366 | - | AUCUAAGAUCCUUUCACAGGAG | 22 | upstream |
| | | (SEQ ID NO: 1220) | | |
| CEP290-369 | - | AAGAUCCUUUCACAGGAG | 18 | upstream |
| | | (SEQ ID NO: 1221) | | |
| CEP290-370 | - | AGCUUUCAGGAUUCCUACUAAAUU | 24 | upstream |
| | | (SEQ ID NO: 1222) | | |
| CEP290-371 | + | ACUCAGAACAACGUUUUCAUUUA | 23 | upstream |
| | | (SEQ ID NO: 1223) | | |
| CEP290-372 | + | AGAACAACGUUUUCAUUUA | 19 | upstream |
| | | (SEQ ID NO: 1224) | | |
| CEP290-373 | - | AGAAUAUCAUAAGUUACAAUCU | 22 | upstream |
| | | (SEQ ID NO: 1225) | | |
| CEP290-375 | - | AAUAUCAUAAGUUACAAUCU | 20 | upstream |
| | | (SEQ ID NO: 1226) | | |
| CEP290-376 | - | AUAUCAUAAGUUACAAUCU | 19 | upstream |
| | | (SEQ ID NO: 1227) | | |
| CEP290-377 | + | AAGUGGCUGUAAGAUAACUACA | 22 | upstream |
| | | (SEQ ID NO: 1228) | | |
| CEP290-378 | + | AGUGGCUGUAAGAUAACUACA | 21 | upstream |
| | | (SEQ ID NO: 1229) | | |
| CEP290-379 | - | AUGUUUAACGUUAUCAUUUUCCCA | 24 | upstream |
| | | (SEQ ID NO: 1230) | | |
| CEP290-380 | - | AACGUUAUCAUUUUCCCA | 18 | upstream |
| | | (SEQ ID NO: 1231) | | |
| CEP290-381 | + | AAGAGAAAGGGAUGGGCACUUA | 22 | upstream |
| | | (SEQ ID NO: 1232) | | |
| CEP290-382 | + | AGAGAAAGGGAUGGGCACUUA | 21 | upstream |
| | | (SEQ ID NO: 1233) | | |
| CEP290-383 | + | AGAAAGGGAUGGGCACUUA | 19 | upstream |
| | | (SEQ ID NO: 1234) | | |
| CEP290-384 | - | AUUCAGUAAAUGAAAACGUUGUU | 23 | upstream |
| | | (SEQ ID NO: 1235) | | |
| CEP290-385 | - | AGUAAAUGAAAACGUUGUU | 19 | upstream |
| | | (SEQ ID NO: 1236) | | |
| CEP290-386 | + | AUAAACAUGACUCAUAAUUUAGU | 23 | upstream |
| | | (SEQ ID NO: 1237) | | |
| CEP290-387 | + | AAACAUGACUCAUAAUUUAGU | 21 | upstream |
| | | (SEQ ID NO: 1238) | | |
| CEP290-388 | + | AACAUGACUCAUAAUUUAGU | 20 | upstream |
| | | (SEQ ID NO: 721) | | |
| CEP290-389 | + | ACAUGACUCAUAAUUUAGU | 19 | upstream |
| | | (SEQ ID NO: 1240) | | |
| CEP290-390 | - | AUUCUUAUCUAAGAUCCUUUCAC | 23 | upstream |
| | | (SEQ ID NO: 1241) | | |
| CEP290-391 | + | AGGAACAAAAGCCAGGGACCAUGG | 24 | upstream |
| | | (SEQ ID NO: 1242) | | |
| CEP290-392 | + | AACAAAAGCCAGGGACCAUGG | 21 | upstream |
| | | (SEQ ID NO: 1243) | | |
| CEP290-393 | + | ACAAAAGCCAGGGACCAUGG | 20 | upstream |
| | | (SEQ ID NO: 1244) | | |
| CEP290-394 | + | AAAAGCCAGGGACCAUGG | 18 | upstream |
| | | (SEQ ID NO: 1245) | | |
| CEP290-395 | + | AGAAUAGUUUGUUCUGGGUAC | 21 | upstream |
| | | (SEQ ID NO: 1246) | | |
| CEP290-396 | + | AAUAGUUUGUUCUGGGUAC | 19 | upstream |
| | | (SEQ ID NO: 1247) | | |
| CEP290-397 | + | AUAGUUUGUUCUGGGUAC | 18 | upstream |
| | | (SEQ ID NO: 1248) | | |
| CEP290-398 | - | AUCAGAAAUAGAGGCUUAUGGAUU | 24 | upstream |
| | | (SEQ ID NO: 1249) | | |
| CEP290-399 | - | AGAAAUAGAGGCUUAUGGAUU | 21 | upstream |
| | | (SEQ ID NO: 1250) | | |
| CEP290-400 | - | AAAUAGAGGCUUAUGGAUU | 19 | upstream |
| | | (SEQ ID NO: 1251) | | |
| CEP290-401 | - | AAUAGAGGCUUAUGGAUU | 18 | upstream |
| | | (SEQ ID NO: 1252) | | |
| CEP290-402 | - | AAUAUAUUAUCUAUUUAUAGUGG | 23 | upstream |
| | | (SEQ ID NO: 1253) | | |
| CEP290-403 | - | AUAUAUUAUCUAUUUAUAGUGG | 22 | upstream |
| | | (SEQ ID NO: 1254) | | |
| CEP290-404 | - | AUAUUAUCUAUUUAUAGUGG | 20 | upstream |
| | | (SEQ ID NO: 1255) | | |
| CEP290-405 | - | AUUAUCUAUUUAUAGUGG | 18 | upstream |
| | | (SEQ ID NO: 1256) | | |
| CEP290-406 | - | AAAUUCUCAUCAUUUUUUAUUG | 22 | upstream |
| | | (SEQ ID NO: 1257) | | |
| CEP290-407 | - | AAUUCUCAUCAUUUUUUAUUG | 21 | upstream |
| | | (SEQ ID NO: 1258) | | |
| CEP290-408 | - | AUUCUCAUCAUUUUUUAUUG | 20 | upstream |
| | | (SEQ ID NO: 1259) | | |
| CEP290-409 | + | AGAGGAUAGGACAGAGGACAUG | 22 | upstream |
| | | (SEQ ID NO: 1260) | | |
| CEP290-410 | + | AGGAUAGGACAGAGGACAUG | 20 | upstream |
| | | (SEQ ID NO: 827) | | |
| CEP290-411 | - | AGAAUAAAUGUAGAAUUUUAAUG | 23 | upstream |
| | | (SEQ ID NO: 1262) | | |
| CEP290-412 | - | AAUAAAUGUAGAAUUUUAAUG | 21 | upstream |
| | | (SEQ ID NO: 1263) | | |
| CEP290-413 | - | AUAAAUGUAGAAUUUUAAUG | 20 | upstream |
| | | (SEQ ID NO: 1264) | | |
| CEP290-414 | - | AAAUGUAGAAUUUUAAUG | 18 | upstream |
| | | (SEQ ID NO: 1265) | | |
| CEP290-415 | - | AUUUUUUAUUGUAGAAUAAAUG | 22 | upstream |
| | | (SEQ ID NO: 1266) | | |
| CEP290-416 | + | CUAAAUCAUGCAAGUGACCUAAG | 23 | upstream |
| | | (SEQ ID NO: 1267) | | |
| CEP290-417 | - | CCUUAGGUCACUUGCAUGAUUUAG | 24 | upstream |
| | | (SEQ ID NO: 1268) | | |
| CEP290-418 | - | CUUAGGUCACUUGCAUGAUUUAG | 23 | upstream |
| | | (SEQ ID NO: 1269) | | |
| CEP290-419 | + | CCUAGGACUUUCUAAUGCUGGA | 22 | upstream |
| | | (SEQ ID NO: 1270) | | |
| CEP290-420 | + | CUAGGACUUUCUAAUGCUGGA | 21 | upstream |
| | | (SEQ ID NO: 1271) | | |
| CEP290-421 | + | CCAUGGGAGAAUAGUUUGUU | 20 | upstream |
| | | (SEQ ID NO: 1272) | | |
| CEP290-422 | + | CAUGGGAGAAUAGUUUGUU | 19 | upstream |
| | | (SEQ ID NO: 1273) | | |
| CEP290-423 | + | CUCCUGUGAAAGGAUCUUAGAU | 22 | upstream |
| | | (SEQ ID NO: 1274) | | |
| CEP290-424 | + | CCUGUGAAAGGAUCUUAGAU | 20 | upstream |
| | | (SEQ ID NO: 860) | | |
| CEP290-426 | + | CUGUGAAAGGAUCUUAGAU | 19 | upstream |
| | | (SEQ ID NO: 1276) | | |
| CEP290-427 | - | CCCUGGCUUUUGUUCCUUGGA | 21 | upstream |
| | | (SEQ ID NO: 1277) | | |
| CEP290-428 | - | CCUGGCUUUUGUUCCUUGGA | 20 | upstream |
| | | (SEQ ID NO: 1278) | | |
| CEP290-429 | - | CUGGCUUUUGUUCCUUGGA | 19 | upstream |
| | | (SEQ ID NO: 1279) | | |
| CEP290-430 | - | CGUUGUUCUGAGUAGCUUU | 19 | upstream |
| | | (SEQ ID NO: 1280) | | |
| CEP290-431 | - | CUAUUUAUAGUGGCUGAAUGACUU | 24 | upstream |
| | | (SEQ ID NO: 1281) | | |
| CEP290-432 | - | CCAUGGUCCCUGGCUUUUGUUCCU | 24 | upstream |
| | | (SEQ ID NO: 1282) | | |
| CEP290-433 | - | CAUGGUCCCUGGCUUUUGUUCCU | 23 | upstream |
| | | (SEQ ID NO: 1283) | | |
| CEP290-434 | - | CAUCUUGUGGAUAAUGUAUCA | 21 | upstream |
| | | (SEQ ID NO: 1284) | | |
| CEP290-435 | - | CUUGUGGAUAAUGUAUCA | 18 | upstream |
| | | (SEQ ID NO: 1285) | | |
| CEP290-437 | - | CCUAGGCAAGAGACAUCUU | 19 | upstream |
| | | (SEQ ID NO: 1286) | | |
| CEP290-438 | - | CUAGGCAAGAGACAUCUU | 18 | upstream |
| | | (SEQ ID NO: 1287) | | |
| CEP290-439 | + | CCAGCAAAAGCUUUUGAGCUAA | 22 | upstream |
| | | (SEQ ID NO: 1288) | | |
| CEP290-440 | + | CAGCAAAAGCUUUUGAGCUAA | 21 | upstream |
| | | (SEQ ID NO: 1289) | | |
| CEP290-441 | + | CAAAAGCUUUUGAGCUAA | 18 | upstream |
| | | (SEQ ID NO: 1290) | | |
| CEP290-442 | + | CUUAUUCUACUCCUGUGA | 18 | upstream |
| | | (SEQ ID NO: 1291) | | |
| CEP290-443 | - | CUAAGAUCCUUUCACAGGAG | 20 | upstream |
| | | (SEQ ID NO: 861) | | |
| CEP290-444 | - | CUUCCUCAUCAGAAAUAGAGGCUU | 24 | upstream |
| | | (SEQ ID NO: 1293) | | |
| CEP290-445 | - | CCUCAUCAGAAAUAGAGGCUU | 21 | upstream |
| | | (SEQ ID NO: 1294) | | |
| CEP290-446 | - | CUCAUCAGAAAUAGAGGCUU | 20 | upstream |
| | | (SEQ ID NO: 865) | | |
| CEP290-447 | - | CAUCAGAAAUAGAGGCUU | 18 | upstream |
| | | (SEQ ID NO: 1296) | | |
| CEP290-448 | - | CUUUCAGGAUUCCUACUAAAUU | 22 | upstream |
| | | (SEQ ID NO: 1297) | | |
| CEP290-449 | - | CAGGAUUCCUACUAAAUU | 18 | upstream |
| | | (SEQ ID NO: 1298) | | |
| CEP290-450 | + | CUGUCCUCAGUAAAAGGUA | 19 | upstream |
| | | (SEQ ID NO: 1299) | | |
| CEP290-451 | + | CUCAGAACAACGUUUUCAUUUA | 22 | upstream |
| | | (SEQ ID NO: 1300) | | |
| CEP290-452 | + | CAGAACAACGUUUUCAUUUA | 20 | upstream |
| | | (SEQ ID NO: 761) | | |
| CEP290-453 | + | CAAGUGGCUGUAAGAUAACUACA | 23 | upstream |
| | | (SEQ ID NO: 1302) | | |
| CEP290-454 | - | CAUUCAGUAAAUGAAAACGUUGUU | 24 | upstream |
| | | (SEQ ID NO: 1303) | | |
| CEP290-457 | - | CAGUAAAUGAAAACGUUGUU | 20 | upstream |
| | | (SEQ ID NO: 849) | | |
| CEP290-458 | + | CAUGACUCAUAAUUUAGU | 18 | upstream |
| | | (SEQ ID NO: 1305) | | |
| CEP290-459 | - | CUUAUCUAAGAUCCUUUCAC | 20 | upstream |
| | | (SEQ ID NO: 734) | | |
| CEP290-460 | + | CAAAAGCCAGGGACCAUGG | 19 | upstream |
| | | (SEQ ID NO: 1307) | | |
| CEP290-461 | - | CAGAAAUAGAGGCUUAUGGAUU | 22 | upstream |
| | | (SEQ ID NO: 1308) | | |
| CEP290-462 | + | CUGGGUACAGGGGUAAGAGAA | 21 | upstream |
| | | (SEQ ID NO: 1309) | | |
| CEP290-463 | - | CAAUAUAUUAUCUAUUUAUAGUGG | 24 | upstream |
| | | (SEQ ID NO: 1310) | | |
| CEP290-464 | - | CAUUUUUUAUUGUAGAAUAAAUG | 23 | upstream |
| | | (SEQ ID NO: 1311) | | |
| CEP290-465 | + | UAAAUCAUGCAAGUGACCUAAG | 22 | upstream |
| | | (SEQ ID NO: 1312) | | |
| CEP290-466 | + | UCAUGCAAGUGACCUAAG | 18 | upstream |
| | | (SEQ ID NO: 1313) | | |
| CEP290-467 | - | UUAGGUCACUUGCAUGAUUUAG | 22 | upstream |
| | | (SEQ ID NO: 1314) | | |
| CEP290-468 | - | UAGGUCACUUGCAUGAUUUAG | 21 | upstream |
| | | (SEQ ID NO: 1315) | | |
| CEP290-469 | - | UAUUAAGGGCUCUUCCUGGACC | 22 | upstream |
| | | (SEQ ID NO: 1316) | | |
| CEP290-470 | - | UUAAGGGCUCUUCCUGGACC | 20 | upstream |
| | | (SEQ ID NO: 1317) | | |
| CEP290-471 | - | UAAGGGCUCUUCCUGGACC | 19 | upstream |
| | | (SEQ ID NO: 1318) | | |
| CEP290-472 | + | UGCCUAGGACUUUCUAAUGCUGGA | 24 | upstream |
| | | (SEQ ID NO: 1319) | | |
| CEP290-473 | + | UAGGACUUUCUAAUGCUGGA | 20 | upstream |
| | | (SEQ ID NO: 882) | | |
| CEP290-474 | + | UACUCCUGUGAAAGGAUCUUAGAU | 24 | upstream |
| | | (SEQ ID NO: 1321) | | |
| CEP290-475 | + | UCCUGUGAAAGGAUCUUAGAU | 21 | upstream |
| | | (SEQ ID NO: 1322) | | |
| CEP290-476 | + | UGUGAAAGGAUCUUAGAU | 18 | upstream |
| | | (SEQ ID NO: 1323) | | |
| CEP290-477 | - | UCCCUGGCUUUUGUUCCUUGGA | 22 | upstream |
| | | (SEQ ID NO: 1324) | | |
| CEP290-515 | - | UGGCUUUUGUUCCUUGGA | 18 | upstream |
| | | (SEQ ID NO: 1325) | | |
| CEP290-516 | - | UAUUUAUAGUGGCUGAAUGACUU | 23 | upstream |
| | | (SEQ ID NO: 1326) | | |
| CEP290-517 | - | UUUAUAGUGGCUGAAUGACUU | 21 | upstream |
| | | (SEQ ID NO: 1327) | | |
| CEP290-518 | - | UUAUAGUGGCUGAAUGACUU | 20 | upstream |
| | | (SEQ ID NO: 1328) | | |
| CEP290-519 | - | UAUAGUGGCUGAAUGACUU | 19 | upstream |
| | | (SEQ ID NO: 1329) | | |
| CEP290-520 | - | UGGUCCCUGGCUUUUGUUCCU | 21 | upstream |
| | | (SEQ ID NO: 1330) | | |
| CEP290-521 | - | UCCCUGGCUUUUGUUCCU | 18 | upstream |
| | | (SEQ ID NO: 1331) | | |
| CEP290-522 | - | UCUUGUGGAUAAUGUAUCA | 19 | upstream |
| | | (SEQ ID NO: 1332) | | |
| CEP290-523 | - | UCCUAGGCAAGAGACAUCUU | 20 | upstream |
| | | (SEQ ID NO: 887) | | |
| CEP290-524 | + | UUAGAUCUUAUUCUACUCCUGUGA | 24 | upstream |
| | | (SEQ ID NO: 1334) | | |
| CEP290-525 | + | UAGAUCUUAUUCUACUCCUGUGA | 23 | upstream |
| | | (SEQ ID NO: 1335) | | |
| CEP290-526 | + | UCUUAUUCUACUCCUGUGA | 19 | upstream |
| | | (SEQ ID NO: 1336) | | |
| CEP290-527 | - | UUAUCUAAGAUCCUUUCACAGGAG | 24 | upstream |
| | | (SEQ ID NO: 1337) | | |
| CEP290-528 | - | UAUCUAAGAUCCUUUCACAGGAG | 23 | upstream |
| | | (SEQ ID NO: 1338) | | |
| CEP290-529 | - | UCUAAGAUCCUUUCACAGGAG | 21 | upstream |
| | | (SEQ ID NO: 1339) | | |
| CEP290-530 | - | UAAGAUCCUUUCACAGGAG | 19 | upstream |
| | | (SEQ ID NO: 1340) | | |
| CEP290-531 | - | UUCCUCAUCAGAAAUAGAGGCUU | 23 | upstream |
| | | (SEQ ID NO: 1341) | | |
| CEP290-532 | - | UCCUCAUCAGAAAUAGAGGCUU | 22 | upstream |
| | | (SEQ ID NO: 1342) | | |
| CEP290-533 | - | UCAUCAGAAAUAGAGGCUU | 19 | upstream |
| | | (SEQ ID NO: 1343) | | |
| CEP290-534 | - | UUUCAGGAUUCCUACUAAAUU | 21 | upstream |
| | | (SEQ ID NO: 1344) | | |
| CEP290-535 | - | UUCAGGAUUCCUACUAAAUU | 20 | upstream |
| | | (SEQ ID NO: 904) | | |
| CEP290-536 | - | UCAGGAUUCCUACUAAAUU | 19 | upstream |
| | | (SEQ ID NO: 1346) | | |
| CEP290-537 | + | UUGUUCUGUCCUCAGUAAAAGGUA | 24 | upstream |
| | | (SEQ ID NO: 1347) | | |
| CEP290-538 | + | UGUUCUGUCCUCAGUAAAAGGUA | 23 | upstream |
| | | (SEQ ID NO: 1348) | | |
| CEP290-539 | + | UUCUGUCCUCAGUAAAAGGUA | 21 | upstream |
| | | (SEQ ID NO: 1349) | | |
| CEP290-540 | + | UCUGUCCUCAGUAAAAGGUA | 20 | upstream |
| | | (SEQ ID NO: 890) | | |
| CEP290-541 | + | UGUCCUCAGUAAAAGGUA | 18 | upstream |
| | | (SEQ ID NO: 1351) | | |
| CEP290-542 | + | UACUCAGAACAACGUUUUCAUUUA | 24 | upstream |
| | | (SEQ ID NO: 1352) | | |
| CEP290-543 | + | UCAGAACAACGUUUUCAUUUA | 21 | upstream |
| | | (SEQ ID NO: 1353) | | |
| CEP290-544 | - | UAGAAUAUCAUAAGUUACAAUCU | 23 | upstream |
| | | (SEQ ID NO: 1354) | | |
| CEP290-545 | - | UAUCAUAAGUUACAAUCU | 18 | upstream |
| | | (SEQ ID NO: 1355) | | |
| CEP290-546 | + | UCAAGUGGCUGUAAGAUAACUACA | 24 | upstream |
| | | (SEQ ID NO: 1356) | | |
| CEP290-547 | + | UGGCUGUAAGAUAACUACA | 19 | upstream |
| | | (SEQ ID NO: 1357) | | |
| CEP290-548 | - | UGUUUAACGUUAUCAUUUUCCCA | 23 | upstream |
| | | (SEQ ID NO: 1358) | | |
| CEP290-549 | - | UUUAACGUUAUCAUUUUCCCA | 21 | upstream |
| | | (SEQ ID NO: 1359) | | |
| CEP290-550 | - | UUAACGUUAUCAUUUUCCCA | 20 | upstream |
| | | (SEQ ID NO: 900) | | |
| CEP290-551 | - | UAACGUUAUCAUUUUCCCA | 19 | upstream |
| | | (SEQ ID NO: 1361) | | |
| CEP290-552 | + | UAAGAGAAAGGGAUGGGCACUUA | 23 | upstream |
| | | (SEQ ID NO: 1362) | | |
| CEP290-553 | - | UUCAGUAAAUGAAAACGUUGUU | 22 | upstream |
| | | (SEQ ID NO: 1363) | | |
| CEP290-554 | - | UCAGUAAAUGAAAACGUUGUU | 21 | upstream |
| | | (SEQ ID NO: 1364) | | |
| CEP290-555 | + | UAAACAUGACUCAUAAUUUAGU | 22 | upstream |
| | | (SEQ ID NO: 1365) | | |
| CEP290-556 | - | UAUUCUUAUCUAAGAUCCUUUCAC | 24 | upstream |
| | | (SEQ ID NO: 1366) | | |
| CEP290-557 | - | UUCUUAUCUAAGAUCCUUUCAC | 22 | upstream |
| | | (SEQ ID NO: 1367) | | |
| CEP290-558 | - | UCUUAUCUAAGAUCCUUUCAC | 21 | upstream |
| | | (SEQ ID NO: 1368) | | |
| CEP290-559 | - | UUAUCUAAGAUCCUUUCAC | 19 | upstream |
| | | (SEQ ID NO: 1369) | | |
| CEP290-560 | - | UAUCUAAGAUCCUUUCAC | 18 | upstream |
| | | (SEQ ID NO: 1370) | | |
| CEP290-561 | - | UCAGAAAUAGAGGCUUAUGGAUU | 23 | upstream |
| | | (SEQ ID NO: 1371) | | |
| CEP290-562 | + | UUCUGGGUACAGGGGUAAGAGAA | 23 | upstream |
| | | (SEQ ID NO: 1372) | | |
| CEP290-563 | + | UCUGGGUACAGGGGUAAGAGAA | 22 | upstream |
| | | (SEQ ID NO: 1373) | | |
| CEP290-564 | + | UGGGUACAGGGGUAAGAGAA | 20 | upstream |
| | | (SEQ ID NO: 1374) | | |
| CEP290-565 | - | UAUAUUAUCUAUUUAUAGUGG | 21 | upstream |
| | | (SEQ ID NO: 1375) | | |
| CEP290-566 | - | UAUUAUCUAUUUAUAGUGG | 19 | upstream |
| | | (SEQ ID NO: 1376) | | |
| CEP290-567 | - | UAAAUUCUCAUCAUUUUUUAUUG | 23 | upstream |
| | | (SEQ ID NO: 1377) | | |
| CEP290-568 | - | UUCUCAUCAUUUUUUAUUG | 19 | upstream |
| | | (SEQ ID NO: 1378) | | |
| CEP290-569 | - | UCUCAUCAUUUUUUAUUG | 18 | upstream |
| | | (SEQ ID NO: 1379) | | |
| CEP290-570 | - | UAGAAUAAAUGUAGAAUUUUAAUG | 24 | upstream |
| | | (SEQ ID NO: 1380) | | |
| CEP290-571 | - | UAAAUGUAGAAUUUUAAUG | 19 | upstream |
| | | (SEQ ID NO: 1381) | | |
| CEP290-572 | - | UCAUUUUUUAUUGUAGAAUAAAUG | 24 | upstream |
| | | (SEQ ID NO: 1382) | | |
| CEP290-573 | - | UUUUUUAUUGUAGAAUAAAUG | 21 | upstream |
| | | (SEQ ID NO: 1383) | | |
| CEP290-574 | - | UUUUUAUUGUAGAAUAAAUG | 20 | upstream |
| | | (SEQ ID NO: 1384) | | |
| CEP290-575 | - | UUUUAUUGUAGAAUAAAUG | 19 | upstream |
| | | (SEQ ID NO: 1385) | | |
| CEP290-576 | - | UUUAUUGUAGAAUAAAUG | 18 | upstream |
| | | (SEQ ID NO: 1386) | | |
| CEP290-577 | - | AAAAGCUACCGGUUACCUG | 19 | downstream |
| | | (SEQ ID NO: 1387) | | |
| CEP290-578 | - | AAAGCUACCGGUUACCUG | 18 | downstream |
| | | (SEQ ID NO: 1388) | | |
| CEP290-579 | + | AGUUUUUAAGGCGGGGAGUCACAU | 24 | downstream |
| | | (SEQ ID NO: 1389) | | |
| CEP290-580 | - | ACAUCCUCCUUACUGCCAC | 19 | downstream |
| | | (SEQ ID NO: 1390) | | |
| CEP290-581 | + | AGUCACAGGGUAGGAUUCAUGUU | 23 | downstream |
| | | (SEQ ID NO: 1391) | | |
| CEP290-582 | + | ACAGGGUAGGAUUCAUGUU | 19 | downstream |
| | | (SEQ ID NO: 1392) | | |
| CEP290-583 | - | ACAGAGUUCAAGCUAAUACAU | 21 | downstream |
| | | (SEQ ID NO: 1393) | | |
| CEP290-584 | - | AGAGUUCAAGCUAAUACAU | 19 | downstream |
| | | (SEQ ID NO: 1394) | | |
| CEP290-585 | + | AUAAGAUGCAGAACUAGUGUAGAC | 24 | downstream |
| | | (SEQ ID NO: 1395) | | |
| CEP290-586 | + | AAGAUGCAGAACUAGUGUAGAC | 22 | downstream |
| | | (SEQ ID NO: 1396) | | |
| CEP290-587 | + | AGAUGCAGAACUAGUGUAGAC | 21 | downstream |
| | | (SEQ ID NO: 1397) | | |
| CEP290-588 | + | AUGCAGAACUAGUGUAGAC | 19 | downstream |
| | | (SEQ ID NO: 1398) | | |
| CEP290-589 | - | AGUAUCUCCUGUUUGGCA | 18 | downstream |
| | | (SEQ ID NO: 1399) | | |
| CEP290-590 | - | ACGAAAAUCAGAUUUCAUGUGUG | 23 | downstream |
| | | (SEQ ID NO: 1400) | | |
| CEP290-591 | - | AAAAUCAGAUUUCAUGUGUG | 20 | downstream |
| | | (SEQ ID NO: 1401) | | |
| CEP290-592 | - | AAAUCAGAUUUCAUGUGUG | 19 | downstream |
| | | (SEQ ID NO: 1402) | | |
| CEP290-593 | - | AAUCAGAUUUCAUGUGUG | 18 | downstream |
| | | (SEQ ID NO: 1403) | | |
| CEP290-594 | - | ACAAGAAUGAUCAUUCUAAAC | 21 | downstream |
| | | (SEQ ID NO: 1404) | | |
| CEP290-595 | - | AAGAAUGAUCAUUCUAAAC | 19 | downstream |
| | | (SEQ ID NO: 1405) | | |
| CEP290-596 | - | AGAAUGAUCAUUCUAAAC | 18 | downstream |
| | | (SEQ ID NO: 1406) | | |
| CEP290-597 | + | AGGCGGGGAGUCACAUGGGAGUCA | 24 | downstream |
| | | (SEQ ID NO: 1407) | | |
| CEP290-598 | + | AGCUUUUGACAGUUUUUAAGGCG | 23 | downstream |
| | | (SEQ ID NO: 1408) | | |
| CEP290-599 | + | AAUGAUCAUUCUUGUGGCAGUAAG | 24 | downstream |
| | | (SEQ ID NO: 1409) | | |
| CEP290-600 | + | AUGAUCAUUCUUGUGGCAGUAAG | 23 | downstream |
| | | (SEQ ID NO: 1410) | | |
| CEP290-601 | + | AUCAUUCUUGUGGCAGUAAG | 20 | downstream |
| | | (SEQ ID NO: 833) | | |
| CEP290-602 | - | AUCUAGAGCAAGAGAUGAACUAG | 23 | downstream |
| | | (SEQ ID NO: 1412) | | |
| CEP290-603 | - | AGAGCAAGAGAUGAACUAG | 19 | downstream |
| | | (SEQ ID NO: 1413) | | |
| CEP290-604 | + | AAUGCCUGAACAAGUUUUGAAAC | 23 | downstream |
| | | (SEQ ID NO: 1414) | | |
| CEP290-605 | + | AUGCCUGAACAAGUUUUGAAAC | 22 | downstream |
| | | (SEQ ID NO: 1415) | | |
| CEP290-606 | - | AGAUUGAGGUAGAAUCAAGAA | 21 | downstream |
| | | (SEQ ID NO: 1416) | | |
| CEP290-607 | - | AUUGAGGUAGAAUCAAGAA | 19 | downstream |
| | | (SEQ ID NO: 1417) | | |
| CEP290-608 | + | AUGUAAGACUGGAGAUAGAGAC | 22 | downstream |
| | | (SEQ ID NO: 1418) | | |
| CEP290-609 | + | AAGACUGGAGAUAGAGAC | 18 | downstream |
| | | (SEQ ID NO: 1419) | | |
| CEP290-610 | + | AGUCACAUGGGAGUCACAGGG | 21 | downstream |
| | | (SEQ ID NO: 1420) | | |
| CEP290-611 | - | ACAUAUCUGUCUUCCUUAA | 19 | downstream |
| | | (SEQ ID NO: 1421) | | |
| CEP290-612 | - | AAAUCAGAUUUCAUGUGUGAAGAA | 24 | downstream |
| | | (SEQ ID NO: 1422) | | |
| CEP290-613 | - | AAUCAGAUUUCAUGUGUGAAGAA | 23 | downstream |
| | | (SEQ ID NO: 1423) | | |
| CEP290-614 | - | AUCAGAUUUCAUGUGUGAAGAA | 22 | downstream |
| | | (SEQ ID NO: 1424) | | |
| CEP290-615 | - | AGAUUUCAUGUGUGAAGAA | 19 | downstream |
| | | (SEQ ID NO: 1425) | | |
| CEP290-616 | + | AAAUAAAACUAAGACACUGCCAAU | 24 | downstream |
| | | (SEQ ID NO: 1025) | | |
| CEP290-617 | + | AAUAAAACUAAGACACUGCCAAU | 23 | downstream |
| | | (SEQ ID NO: 1026) | | |
| CEP290-618 | + | AUAAAACUAAGACACUGCCAAU | 22 | downstream |
| | | (SEQ ID NO: 1027) | | |
| CEP290-619 | + | AAAACUAAGACACUGCCAAU | 20 | downstream |
| | | (SEQ ID NO: 610) | | |
| CEP290-620 | + | AAACUAAGACACUGCCAAU | 19 | downstream |
| | | (SEQ ID NO: 1028) | | |
| CEP290-621 | + | AACUAAGACACUGCCAAU | 18 | downstream |
| | | (SEQ ID NO: 1029) | | |
| CEP290-622 | - | AACUAUUUAAUUUGUUUCUGUGUG | 24 | downstream |
| | | (SEQ ID NO: 1431) | | |
| CEP290-623 | - | ACUAUUUAAUUUGUUUCUGUGUG | 23 | downstream |
| | | (SEQ ID NO: 1432) | | |
| CEP290-624 | - | AUUUAAUUUGUUUCUGUGUG | 20 | downstream |
| | | (SEQ ID NO: 840) | | |
| CEP290-625 | - | CUGUCAAAAGCUACCGGUUACCUG | 24 | downstream |
| | | (SEQ ID NO: 1434) | | |
| CEP290-626 | - | CAAAAGCUACCGGUUACCUG | 20 | downstream |
| | | (SEQ ID NO: 755) | | |
| CEP290-627 | - | CUUACAUCCUCCUUACUGCCAC | 22 | downstream |
| | | (SEQ ID NO: 1436) | | |
| CEP290-628 | - | CAUCCUCCUUACUGCCAC | 18 | downstream |
| | | (SEQ ID NO: 1437) | | |
| CEP290-629 | + | CACAGGGUAGGAUUCAUGUU | 20 | downstream |
| | | (SEQ ID NO: 846) | | |
| CEP290-630 | + | CAGGGUAGGAUUCAUGUU | 18 | downstream |
| | | (SEQ ID NO: 1439) | | |
| CEP290-631 | - | CACAGAGUUCAAGCUAAUACAU | 22 | downstream |
| | | (SEQ ID NO: 1440) | | |
| CEP290-632 | - | CAGAGUUCAAGCUAAUACAU | 20 | downstream |
| | | (SEQ ID NO: 848) | | |
| CEP290-633 | - | CACGAAAAUCAGAUUUCAUGUGUG | 24 | downstream |
| | | (SEQ ID NO: 1442) | | |
| CEP290-634 | - | CGAAAAUCAGAUUUCAUGUGUG | 22 | downstream |
| | | (SEQ ID NO: 1443) | | |
| CEP290-635 | - | CCACAAGAAUGAUCAUUCUAAAC | 23 | downstream |
| | | (SEQ ID NO: 1444) | | |
| CEP290-636 | - | CACAAGAAUGAUCAUUCUAAAC | 22 | downstream |
| | | (SEQ ID NO: 1445) | | |
| CEP290-637 | - | CAAGAAUGAUCAUUCUAAAC | 20 | downstream |
| | | (SEQ ID NO: 844) | | |
| CEP290-638 | + | CGGGGAGUCACAUGGGAGUCA | 21 | downstream |
| | | (SEQ ID NO: 1447) | | |
| CEP290-639 | + | CUUUUGACAGUUUUUAAGGCG | 21 | downstream |
| | | (SEQ ID NO: 1448) | | |
| CEP290-640 | + | CAUUCUUGUGGCAGUAAG | 18 | downstream |
| | | (SEQ ID NO: 1449) | | |
| CEP290-641 | - | CAUCUAGAGCAAGAGAUGAACUAG | 24 | downstream |
| | | (SEQ ID NO: 1450) | | |
| CEP290-642 | - | CUAGAGCAAGAGAUGAACUAG | 21 | downstream |
| | | (SEQ ID NO: 1451) | | |
| CEP290-643 | + | CCUGAACAAGUUUUGAAAC | 19 | downstream |
| | | (SEQ ID NO: 1452) | | |
| CEP290-644 | + | CUGAACAAGUUUUGAAAC | 18 | downstream |
| | | (SEQ ID NO: 1453) | | |
| CEP290-645 | - | CUCUCUUCCAGUUGUUUUGCUCA | 23 | downstream |
| | | (SEQ ID NO: 1454) | | |
| CEP290-646 | - | CUCUUCCAGUUGUUUUGCUCA | 21 | downstream |
| | | (SEQ ID NO: 1455) | | |
| CEP290-647 | - | CUUCCAGUUGUUUUGCUCA | 19 | downstream |
| | | (SEQ ID NO: 1456) | | |
| CEP290-648 | + | CACAUGGGAGUCACAGGG | 18 | downstream |
| | | (SEQ ID NO: 1457) | | |
| CEP290-649 | - | CAUAUCUGUCUUCCUUAA | 18 | downstream |
| | | (SEQ ID NO: 1458) | | |
| CEP290-650 | - | CAGAUUUCAUGUGUGAAGAA | 20 | downstream |
| | | (SEQ ID NO: 1124) | | |
| CEP290-651 | - | CUAUUUAAUUUGUUUCUGUGUG | 22 | downstream |
| | | (SEQ ID NO: 1460) | | |
| CEP290-652 | - | UGUCAAAAGCUACCGGUUACCUG | 23 | downstream |
| | | (SEQ ID NO: 1461) | | |
| CEP290-653 | - | UCAAAAGCUACCGGUUACCUG | 21 | downstream |
| | | (SEQ ID NO: 1462) | | |
| CEP290-654 | + | UUUUUAAGGCGGGGAGUCACAU | 22 | downstream |
| | | (SEQ ID NO: 1463) | | |
| CEP290-655 | + | UUUUAAGGCGGGGAGUCACAU | 21 | downstream |
| | | (SEQ ID NO: 1464) | | |
| CEP290-656 | + | UUUAAGGCGGGGAGUCACAU | 20 | downstream |
| | | (SEQ ID NO: 619) | | |
| CEP290-657 | + | UUAAGGCGGGGAGUCACAU | 19 | downstream |
| | | (SEQ ID NO: 1466) | | |
| CEP290-658 | + | UAAGGCGGGGAGUCACAU | 18 | downstream |
| | | (SEQ ID NO: 1467) | | |
| CEP290-659 | - | UCUUACAUCCUCCUUACUGCCAC | 23 | downstream |
| | | (SEQ ID NO: 1468) | | |
| CEP290-660 | - | UUACAUCCUCCUUACUGCCAC | 21 | downstream |
| | | (SEQ ID NO: 1469) | | |
| CEP290-661 | - | UACAUCCUCCUUACUGCCAC | 20 | downstream |
| | | (SEQ ID NO: 875) | | |
| CEP290-662 | + | UCACAGGGUAGGAUUCAUGUU | 21 | downstream |
| | | (SEQ ID NO: 1471) | | |
| CEP290-663 | + | UAAGAUGCAGAACUAGUGUAGAC | 23 | downstream |
| | | (SEQ ID NO: 1472) | | |
| CEP290-664 | + | UGCAGAACUAGUGUAGAC | 18 | downstream |
| | | (SEQ ID NO: 1473) | | |
| CEP290-665 | - | UGUUGAGUAUCUCCUGUUUGGCA | 23 | downstream |
| | | (SEQ ID NO: 1474) | | |
| CEP290-666 | - | UUGAGUAUCUCCUGUUUGGCA | 21 | downstream |
| | | (SEQ ID NO: 1475) | | |
| CEP290-667 | - | UGAGUAUCUCCUGUUUGGCA | 20 | downstream |
| | | (SEQ ID NO: 895) | | |
| CEP290-668 | + | UAGCUUUUGACAGUUUUUAAGGCG | 24 | downstream |
| | | (SEQ ID NO: 1477) | | |
| CEP290-669 | + | UUUUGACAGUUUUUAAGGCG | 20 | downstream |
| | | (SEQ ID NO: 681) | | |
| CEP290-670 | + | UUUGACAGUUUUUAAGGCG | 19 | downstream |
| | | (SEQ ID NO: 1479) | | |
| CEP290-671 | + | UUGACAGUUUUUAAGGCG | 18 | downstream |
| | | (SEQ ID NO: 1480) | | |
| CEP290-672 | + | UGAUCAUUCUUGUGGCAGUAAG | 22 | downstream |
| | | (SEQ ID NO: 1481) | | |
| CEP290-673 | + | UCAUUCUUGUGGCAGUAAG | 19 | downstream |
| | | (SEQ ID NO: 1482) | | |
| CEP290-674 | - | UCUAGAGCAAGAGAUGAACUAG | 22 | downstream |
| | | (SEQ ID NO: 1483) | | |
| CEP290-675 | - | UAGAGCAAGAGAUGAACUAG | 20 | downstream |
| | | (SEQ ID NO: 878) | | |
| CEP290-676 | + | UAAUGCCUGAACAAGUUUUGAAAC | 24 | downstream |
| | | (SEQ ID NO: 1485) | | |
| CEP290-677 | + | UGCCUGAACAAGUUUUGAAAC | 21 | downstream |
| | | (SEQ ID NO: 1486) | | |
| CEP290-678 | - | UGUAGAUUGAGGUAGAAUCAAGAA | 24 | downstream |
| | | (SEQ ID NO: 1487) | | |
| CEP290-679 | - | UAGAUUGAGGUAGAAUCAAGAA | 22 | downstream |
| | | (SEQ ID NO: 1488) | | |
| CEP290-680 | - | UUGAGGUAGAAUCAAGAA | 18 | downstream |
| | | (SEQ ID NO: 1489) | | |
| CEP290-681 | + | UGUAAGACUGGAGAUAGAGAC | 21 | downstream |
| | | (SEQ ID NO: 1490) | | |
| CEP290-682 | + | UAAGACUGGAGAUAGAGAC | 19 | downstream |
| | | (SEQ ID NO: 1491) | | |
| CEP290-683 | - | UCUCUCUUCCAGUUGUUUUGCUCA | 24 | downstream |
| | | (SEQ ID NO: 1492) | | |
| CEP290-684 | - | UCUCUUCCAGUUGUUUUGCUCA | 22 | downstream |
| | | (SEQ ID NO: 1493) | | |
| CEP290-685 | - | UCUUCCAGUUGUUUUGCUCA | 20 | downstream |
| | | (SEQ ID NO: 893) | | |
| CEP290-686 | - | UUCCAGUUGUUUUGCUCA | 18 | downstream |
| | | (SEQ ID NO: 1495) | | |
| CEP290-687 | + | UCACAUGGGAGUCACAGGG | 19 | downstream |
| | | (SEQ ID NO: 1496) | | |
| CEP290-688 | - | UGUUUACAUAUCUGUCUUCCUUAA | 24 | downstream |
| | | (SEQ ID NO: 1497) | | |
| CEP290-689 | - | UUUACAUAUCUGUCUUCCUUAA | 22 | downstream |
| | | (SEQ ID NO: 1498) | | |
| CEP290-690 | - | UUACAUAUCUGUCUUCCUUAA | 21 | downstream |
| | | (SEQ ID NO: 1499) | | |
| CEP290-691 | - | UACAUAUCUGUCUUCCUUAA | 20 | downstream |
| | | (SEQ ID NO: 689) | | |
| CEP290-692 | - | UCAGAUUUCAUGUGUGAAGAA | 21 | downstream |
| | | (SEQ ID NO: 1501) | | |
| CEP290-693 | + | UAAAACUAAGACACUGCCAAU | 21 | downstream |
| | | (SEQ ID NO: 1035) | | |
| CEP290-694 | - | UAUUUAAUUUGUUUCUGUGUG | 21 | downstream |
| | | (SEQ ID NO: 1503) | | |
| CEP290-695 | - | UUUAAUUUGUUUCUGUGUG | 19 | downstream |
| | | (SEQ ID NO: 1504) | | |
| CEP290-696 | - | UUAAUUUGUUUCUGUGUG | 18 | downstream |
| | | (SEQ ID NO: 1505) | | |

[0920] Table 9C provides targeting domains for break-induced deletion of genomic sequence including the mutation at the LCA10 target position in the CEP290 gene selected according to the third tier parameters. The targeting domains are within 1000 bp upstream of an Alu repeat, within 40 bp upstream of mutation, or 1000 bp downstream of the mutation, start with G and PAM is NNGRRT. It is contemplated herein that the targeting domain hybridizes to the target domain through complementary base pairing. Any of the targeting domains in the table can be used with a S. aureus Cas9 molecule that generates a double stranded break (Cas9 nuclease) or a single-stranded break (Cas9 nickase).

TABLE 9C

| | | | Target | Position |
|---|---|---|---|---|
| | DNA | | Site | relative to |
| gRNA Name | Strand | Targeting Domain | Length | mutation |
| CEP290-697 | - | GUAGAAUAAAUUUAUUUAAUG | 21 | upstream |
| | | (SEQ ID NO: 1506) | | |
| CEP290-495 | - | GAAUAAAUUUAUUUAAUG | 18 | upstream |
| | | (SEQ ID NO: 1507) | | |
| CEP290-698 | - | GAGAAAAAGGAGCAUGAAACAGG | 23 | upstream |
| | | (SEQ ID NO: 1508) | | |
| CEP290-699 | - | GAAAAAGGAGCAUGAAACAGG | 21 | upstream |
| | | (SEQ ID NO: 1509) | | |
| CEP290-700 | - | GUAGAAUAAAAAAUAAAAAAAC | 22 | upstream |
| | | (SEQ ID NO: 1510) | | |
| CEP290-701 | - | GAAUAAAAAAUAAAAAAAC | 19 | upstream |
| | | (SEQ ID NO: 1511) | | |
| CEP290-702 | - | GAAUAAAAAAUAAAAAAACUAGAG | 24 | upstream |
| | | (SEQ ID NO: 1512) | | |
| CEP290-508 | - | GAAAUAGAUGUAGAUUGAGG | 20 | downstream |
| | | (SEQ ID NO: 1513) | | |
| CEP290-703 | - | GAUAAUAAGGAAAUACAAAAA | 21 | downstream |
| | | (SEQ ID NO: 1514) | | |
| CEP290-704 | - | GUGUUGCCCAGGCUGGAGUGCAG | 23 | downstream |
| | | (SEQ ID NO: 1515) | | |
| CEP290-705 | - | GUUGCCCAGGCUGGAGUGCAG | 21 | downstream |
| | | (SEQ ID NO: 1516) | | |
| CEP290-706 | - | GCCCAGGCUGGAGUGCAG | 18 | downstream |
| | | (SEQ ID NO: 1517) | | |
| CEP290-707 | - | GUUGUUUUUUUUUUUGAAA | 19 | downstream |
| | | (SEQ ID NO: 1518) | | |
| CEP290-708 | - | GAGUCUCACUGUGUUGCCCAGGC | 23 | downstream |
| | | (SEQ ID NO: 1519) | | |
| CEP290-709 | - | GUCUCACUGUGUUGCCCAGGC | 21 | downstream |
| | | (SEQ ID NO: 1520) | | |

[0921] Table 9D provides targeting domains for break-induced deletion of genomic sequence including the mutation at the LCA10 target position in the CEP290 gene selected according to the fourth tier parameters. The targeting domains are within 1000 bp upstream of an Alu repeat, within 40 bp upstream of mutation, or 1000 bp downstream of the mutation and PAM is NNGRRT. It is contemplated herein that the targeting domain hybridizes to the target domain through complementary base pairing. Any of the targeting domains in the table can be used with a S. aureus Cas9 molecule that generates a double stranded break (Cas9 nuclease) or a single-stranded break (Cas9 nickase).

TABLE 9D

| | | | Target | Position |
|---|---|---|---|---|
| | DNA | | Site | relative to |
| gRNA Name | Strand | Targeting Domain | Length | mutation |
| CEP290-710 | - | AAUGUAGAAUAAAUUUAUUUAAUG | 24 | upstream |
| | | (SEQ ID NO: 1521) | | |
| CEP290-711 | - | AUGUAGAAUAAAUUUAUUUAAUG | 23 | upstream |
| | | (SEQ ID NO: 1522) | | |
| CEP290-712 | - | AGAAUAAAUUUAUUUAAUG | 19 | upstream |
| | | (SEQ ID NO: 1523) | | |
| CEP290-713 | + | AUUUAUUCUACAAUAAAAAAUGAU | 24 | upstream |
| | | (SEQ ID NO: 1524) | | |
| CEP290-714 | + | AUUCUACAAUAAAAAAUGAU | 20 | upstream |
| | | (SEQ ID NO: 1525) | | |
| CEP290-715 | - | AGAGAAAAAGGAGCAUGAAACAGG | 24 | upstream |
| | | (SEQ ID NO: 1526) | | |
| CEP290-716 | - | AGAAAAAGGAGCAUGAAACAGG | 22 | upstream |
| | | (SEQ ID NO: 1527) | | |
| CEP290-717 | - | AAAAAGGAGCAUGAAACAGG | 20 | upstream |
| | | (SEQ ID NO: 1528) | | |
| CEP290-718 | - | AAAAGGAGCAUGAAACAGG | 19 | upstream |
| | | (SEQ ID NO: 1529) | | |
| CEP290-719 | - | AAAGGAGCAUGAAACAGG | 18 | upstream |
| | | (SEQ ID NO: 1530) | | |
| CEP290-720 | + | ACAAUAAAAAAUGAUGAGAAUUUA | 24 | upstream |
| | | (SEQ ID NO: 1531) | | |
| CEP290-721 | + | AAUAAAAAAUGAUGAGAAUUUA | 22 | upstream |
| | | (SEQ ID NO: 1532) | | |
| CEP290-722 | + | AUAAAAAAUGAUGAGAAUUUA | 21 | upstream |
| | | (SEQ ID NO: 1533) | | |
| CEP290-723 | + | AAAAAAUGAUGAGAAUUUA | 19 | upstream |
| | | (SEQ ID NO: 1534) | | |
| CEP290-724 | + | AAAAAUGAUGAGAAUUUA | 18 | upstream |
| | | (SEQ ID NO: 1535) | | |
| CEP290-725 | - | AUGUAGAAUAAAAAAUAAAAAAAC | 24 | upstream |
| | | (SEQ ID NO: 1536) | | |
| CEP290-726 | - | AGAAUAAAAAAUAAAAAAAC | 20 | upstream |
| | | (SEQ ID NO: 1537) | | |
| CEP290-727 | - | AAUAAAAAAUAAAAAAAC | 18 | upstream |
| | | (SEQ ID NO: 1538) | | |
| CEP290-728 | - | AAUAAAAAAUAAAAAAACUAGAG | 23 | upstream |
| | | (SEQ ID NO: 1539) | | |
| CEP290-729 | - | AUAAAAAAUAAAAAAACUAGAG | 22 | upstream |
| | | (SEQ ID NO: 1540) | | |
| CEP290-730 | - | AAAAAAUAAAAAAACUAGAG | 20 | upstream |
| | | (SEQ ID NO: 1541) | | |
| CEP290-731 | - | AAAAAUAAAAAAACUAGAG | 19 | upstream |
| | | (SEQ ID NO: 1542) | | |
| CEP290-732 | - | AAAAUAAAAAAACUAGAG | 18 | upstream |
| | | (SEQ ID NO: 1543) | | |
| CEP290-733 | + | CAAUAAAAAAUGAUGAGAAUUUA | 23 | upstream |
| | | (SEQ ID NO: 1544) | | |
| CEP290-734 | - | UGUAGAAUAAAUUUAUUUAAUG | 22 | upstream |
| | | (SEQ ID NO: 1545) | | |
| CEP290-735 | - | UAGAAUAAAUUUAUUUAAUG | 20 | upstream |
| | | (SEQ ID NO: 1546) | | |
| CEP290-736 | + | UUUAUUCUACAAUAAAAAAUGAU | 23 | upstream |
| | | (SEQ ID NO: 1547) | | |
| CEP290-737 | + | UUAUUCUACAAUAAAAAAUGAU | 22 | upstream |
| | | (SEQ ID NO: 1548) | | |
| CEP290-738 | + | UAUUCUACAAUAAAAAAUGAU | 21 | upstream |
| | | (SEQ ID NO: 1549) | | |
| CEP290-739 | + | UUCUACAAUAAAAAAUGAU | 19 | upstream |
| | | (SEQ ID NO: 1550) | | |
| CEP290-740 | + | UCUACAAUAAAAAAUGAU | 18 | upstream |
| | | (SEQ ID NO: 1551) | | |
| CEP290-741 | + | UAAAAAAUGAUGAGAAUUUA | 20 | upstream |
| | | (SEQ ID NO: 1552) | | |
| CEP290-742 | - | UGUAGAAUAAAAAAUAAAAAAAC | 23 | upstream |
| | | (SEQ ID NO: 1553) | | |
| CEP290-743 | - | UAGAAUAAAAAAUAAAAAAAC | 21 | upstream |
| | | (SEQ ID NO: 1554) | | |
| CEP290-744 | - | UAAAAAAUAAAAAAACUAGAG | 21 | upstream |
| | | (SEQ ID NO: 1555) | | |
| CEP290-745 | - | AAAAGAAAUAGAUGUAGAUUGAGG | 24 | downstream |
| | | (SEQ ID NO: 1556) | | |
| CEP290-746 | - | AAAGAAAUAGAUGUAGAUUGAGG | 23 | downstream |
| | | (SEQ ID NO: 1557) | | |
| CEP290-747 | - | AAGAAAUAGAUGUAGAUUGAGG | 22 | downstream |
| | | (SEQ ID NO: 1558) | | |
| CEP290-748 | - | AGAAAUAGAUGUAGAUUGAGG | 21 | downstream |
| | | (SEQ ID NO: 1559) | | |
| CEP290-749 | - | AAAUAGAUGUAGAUUGAGG | 19 | downstream |
| | | (SEQ ID NO: 1560) | | |
| CEP290-750 | - | AAUAGAUGUAGAUUGAGG | 18 | downstream |
| | | (SEQ ID NO: 1561) | | |
| CEP290-751 | - | AUAAUAAGGAAAUACAAAAACUGG | 24 | downstream |
| | | (SEQ ID NO: 1562) | | |
| CEP290-752 | - | AAUAAGGAAAUACAAAAACUGG | 22 | downstream |
| | | (SEQ ID NO: 1563) | | |
| CEP290-753 | - | AUAAGGAAAUACAAAAACUGG | 21 | downstream |
| | | (SEQ ID NO: 1564) | | |
| CEP290-754 | - | AAGGAAAUACAAAAACUGG | 19 | downstream |
| | | (SEQ ID NO: 1565) | | |
| CEP290-755 | - | AGGAAAUACAAAAACUGG | 18 | downstream |
| | | (SEQ ID NO: 1566) | | |
| CEP290-756 | - | AUAGAUAAUAAGGAAAUACAAAAA | 24 | downstream |
| | | (SEQ ID NO: 1567) | | |
| CEP290-757 | - | AGAUAAUAAGGAAAUACAAAAA | 22 | downstream |
| | | (SEQ ID NO: 1568) | | |
| CEP290-758 | - | AUAAUAAGGAAAUACAAAAA | 20 | downstream |
| | | (SEQ ID NO: 1569) | | |
| CEP290-759 | - | AAUAAGGAAAUACAAAAA | 18 | downstream |
| | | (SEQ ID NO: 1570) | | |
| CEP290-760 | + | AAAAAAAAAAACAACAAAAA | 20 | downstream |
| | | (SEQ ID NO: 1571) | | |
| CEP290-761 | + | AAAAAAAAAACAACAAAAA | 19 | downstream |
| | | (SEQ ID NO: 1572) | | |
| CEP290-762 | + | AAAAAAAAACAACAAAAA | 18 | downstream |
| | | (SEQ ID NO: 1573) | | |
| CEP290-763 | - | AGAGUCUCACUGUGUUGCCCAGGC | 24 | downstream |
| | | (SEQ ID NO: 1574) | | |
| CEP290-764 | - | AGUCUCACUGUGUUGCCCAGGC | 22 | downstream |
| | | (SEQ ID NO: 1575) | | |
| CEP290-765 | + | CAAAAAAAAAAACAACAAAAA | 21 | downstream |
| | | (SEQ ID NO: 1576) | | |
| CEP290-766 | - | CUCACUGUGUUGCCCAGGC | 19 | downstream |
| | | (SEQ ID NO: 1577) | | |
| CEP290-767 | - | UAAUAAGGAAAUACAAAAACUGG | 23 | downstream |
| | | (SEQ ID NO: 1578) | | |
| CEP290-768 | - | UAAGGAAAUACAAAAACUGG | 20 | downstream |
| | | (SEQ ID NO: 1579) | | |
| CEP290-769 | - | UAGAUAAUAAGGAAAUACAAAAA | 23 | downstream |
| | | (SEQ ID NO: 1580) | | |
| CEP290-770 | - | UAAUAAGGAAAUACAAAAA | 19 | downstream |
| | | (SEQ ID NO: 1581) | | |
| CEP290-771 | - | UGUGUUGCCCAGGCUGGAGUGCAG | 24 | downstream |
| | | (SEQ ID NO: 1582) | | |
| CEP290-772 | - | UGUUGCCCAGGCUGGAGUGCAG | 22 | downstream |
| | | (SEQ ID NO: 1583) | | |
| CEP290-773 | - | UUGCCCAGGCUGGAGUGCAG | 20 | downstream |
| | | (SEQ ID NO: 1189) | | |
| CEP290-774 | - | UGCCCAGGCUGGAGUGCAG | 19 | downstream |
| | | (SEQ ID NO: 1585) | | |
| CEP290-775 | + | UUUCAAAAAAAAAAACAACAAAAA | 24 | downstream |
| | | (SEQ ID NO: 1586) | | |
| CEP290-776 | + | UUCAAAAAAAAAAACAACAAAAA | 23 | downstream |
| | | (SEQ ID NO: 1587) | | |
| CEP290-777 | + | UCAAAAAAAAAAACAACAAAAA | 22 | downstream |
| | | (SEQ ID NO: 1588) | | |
| CEP290-778 | - | UUUUUGUUGUUUUUUUUUUUGAAA | 24 | downstream |
| | | (SEQ ID NO: 1589) | | |
| CEP290-779 | - | UUUUGUUGUUUUUUUUUUUGAAA | 23 | downstream |
| | | (SEQ ID NO: 1590) | | |
| CEP290-780 | - | UUUGUUGUUUUUUUUUUUGAAA | 22 | downstream |
| | | (SEQ ID NO: 1591) | | |
| CEP290-781 | - | UUGUUGUUUUUUUUUUUGAAA | 21 | downstream |
| | | (SEQ ID NO: 1592) | | |
| CEP290-782 | - | UGUUGUUUUUUUUUUUGAAA | 20 | downstream |
| | | (SEQ ID NO: 1593) | | |
| CEP290-783 | - | UUGUUUUUUUUUUUGAAA | 18 | downstream |
| | | (SEQ ID NO: 1594) | | |
| CEP290-784 | - | UCUCACUGUGUUGCCCAGGC | 20 | downstream |
| | | (SEQ ID NO: 1182) | | |
| CEP290-785 | - | UCACUGUGUUGCCCAGGC | 18 | downstream |
| | | (SEQ ID NO: 1596) | | |

[0922] Table 9E provides targeting domains for break-induced deletion of genomic sequence including the mutation at the LCA10 target position in the CEP290 gene selected according to the fifth tier parameters. The targeting domains are within 1000 bp upstream of an Alu repeat, within 40 bp upstream of mutation, or 1000 bp downstream of the mutation and PAM is NNGRRV. It is contemplated herein that the targeting domain hybridizes to the target domain through complementary base pairing. Any of the targeting domains in the table can be used with a S. aureus Cas9 molecule that generates a double stranded break (Cas9 nuclease) or a single-stranded break (Cas9 nickase).

TABLE 9E

| | | | Target | Position |
|---|---|---|---|---|
| | DNA | | Site | relative to |
| gRNA Name | Strand | Targeting Domain | Length | mutation |
| CEP290-786 | + | ACUGUUGGCUACAUCCAUUCC | 21 | upstream |
| | | (SEQ ID NO: 1597) | | |
| CEP290-787 | + | AAUUUACAGAGUGCAUCCAUGGUC | 24 | upstream |
| | | (SEQ ID NO: 1598) | | |
| CEP290-788 | + | AUUUACAGAGUGCAUCCAUGGUC | 23 | upstream |
| | | (SEQ ID NO: 1599) | | |
| CEP290-789 | + | ACAGAGUGCAUCCAUGGUC | 19 | upstream |
| | | (SEQ ID NO: 1600) | | |
| CEP290-790 | − | AGCAUUAGAAAGUCCUAGGC | 20 | upstream |
| | | (SEQ ID NO: 823) | | |
| CEP290-791 | − | AUGGUCCCUGGCUUUUGUUCC | 21 | upstream |
| | | (SEQ ID NO: 1602) | | |
| CEP290-792 | − | AUAGAGACACAUUCAGUAA | 19 | upstream |
| | | (SEQ ID NO: 1603) | | |
| CEP290-793 | − | AGCUCAAAAGCUUUUGCUGGCUCA | 24 | upstream |
| | | (SEQ ID NO: 1604) | | |
| CEP290-794 | − | AAAAGCUUUUGCUGGCUCA | 19 | upstream |
| | | (SEQ ID NO: 1605) | | |
| CEP290-795 | − | AAAGCUUUUGCUGGCUCA | 18 | upstream |
| | | (SEQ ID NO: 1606) | | |
| CEP290-796 | + | AAUCCAUAAGCCUCUAUUUCUGAU | 24 | upstream |
| | | (SEQ ID NO: 1607) | | |
| CEP290-797 | + | AUCCAUAAGCCUCUAUUUCUGAU | 23 | upstream |
| | | (SEQ ID NO: 1608) | | |
| CEP290-798 | + | AUAAGCCUCUAUUUCUGAU | 19 | upstream |
| | | (SEQ ID NO: 1609) | | |
| CEP290-799 | + | AGCUAAAUCAUGCAAGUGACCUA | 23 | upstream |
| | | (SEQ ID NO: 1610) | | |
| CEP290-800 | + | AAAUCAUGCAAGUGACCUA | 19 | upstream |
| | | (SEQ ID NO: 1611) | | |
| CEP290-801 | + | AAUCAUGCAAGUGACCUA | 18 | upstream |
| | | (SEQ ID NO: 1612) | | |
| CEP290-802 | − | AAACCUCUUUUAACCAGACAUCU | 23 | upstream |
| | | (SEQ ID NO: 1613) | | |
| CEP290-803 | − | AACCUCUUUUAACCAGACAUCU | 22 | upstream |
| | | (SEQ ID NO: 1614) | | |
| CEP290-804 | − | ACCUCUUUUAACCAGACAUCU | 21 | upstream |
| | | (SEQ ID NO: 1615) | | |
| CEP290-805 | + | AGUUUGUUCUGGGUACAGGGGUAA | 24 | upstream |
| | | (SEQ ID NO: 1616) | | |
| CEP290-806 | + | AUGACUCAUAAUUUAGUAGGAAUC | 24 | upstream |
| | | (SEQ ID NO: 1617) | | |
| CEP290-807 | + | ACUCAUAAUUUAGUAGGAAUC | 21 | upstream |
| | | (SEQ ID NO: 1618) | | |
| CEP290-808 | − | AAUGGAUGUAGCCAACAGUAG | 21 | upstream |
| | | (SEQ ID NO: 1619) | | |
| CEP290-809 | − | AUGGAUGUAGCCAACAGUAG | 20 | upstream |
| | | (SEQ ID NO: 1620) | | |
| CEP290-810 | + | AUCACCUCUCUUUGGCAAAAGCAG | 24 | upstream |
| | | (SEQ ID NO: 1621) | | |
| CEP290-811 | + | ACCUCUCUUUGGCAAAAGCAG | 21 | upstream |
| | | (SEQ ID NO: 1622) | | |
| CEP290-812 | − | AGGUAGAAUAUUGUAAUCAAAGG | 23 | upstream |
| | | (SEQ ID NO: 1623) | | |
| CEP290-813 | − | AGAAUAUUGUAAUCAAAGG | 19 | upstream |
| | | (SEQ ID NO: 1624) | | |
| CEP290-814 | + | AAGGAACAAAAGCCAGGGACC | 21 | upstream |
| | | (SEQ ID NO: 1625) | | |
| CEP290-815 | + | AGGAACAAAAGCCAGGGACC | 20 | upstream |
| | | (SEQ ID NO: 1626) | | |
| CEP290-816 | + | ACAUCCAUUCCAAGGAACAAAAGC | 24 | upstream |
| | | (SEQ ID NO: 1627) | | |
| CEP290-817 | + | AUCCAUUCCAAGGAACAAAAGC | 22 | upstream |
| | | (SEQ ID NO: 1628) | | |
| CEP290-818 | + | AUUCCAAGGAACAAAAGC | 18 | upstream |
| | | (SEQ ID NO: 1629) | | |
| CEP290-819 | + | AGAAUUAGAUCUUAUUCUACUCCU | 24 | upstream |
| | | (SEQ ID NO: 1630) | | |
| CEP290-820 | + | AAUUAGAUCUUAUUCUACUCCU | 22 | upstream |
| | | (SEQ ID NO: 1631) | | |
| CEP290-821 | + | AUUAGAUCUUAUUCUACUCCU | 21 | upstream |
| | | (SEQ ID NO: 1632) | | |
| CEP290-822 | + | AGAUCUUAUUCUACUCCU | 18 | upstream |
| | | (SEQ ID NO: 1633) | | |
| CEP290-823 | − | AUUUGUUCAUCUUCCUCAU | 19 | upstream |
| | | (SEQ ID NO: 1634) | | |
| CEP290-824 | − | AGAGGUGAUUAUGUUACUUUUUA | 23 | upstream |
| | | (SEQ ID NO: 1635) | | |
| CEP290-825 | − | AGGUGAUUAUGUUACUUUUUA | 21 | upstream |
| | | (SEQ ID NO: 1636) | | |
| CEP290-826 | − | AACCUCUUUUAACCAGACAUCUAA | 24 | upstream |
| | | (SEQ ID NO: 1637) | | |
| CEP290-827 | − | ACCUCUUUUAACCAGACAUCUAA | 23 | upstream |
| | | (SEQ ID NO: 1638) | | |
| CEP290-828 | + | AUAAACAUGACUCAUAAUUUAG | 22 | upstream |
| | | (SEQ ID NO: 1639) | | |
| CEP290-829 | + | AAACAUGACUCAUAAUUUAG | 20 | upstream |
| | | (SEQ ID NO: 805) | | |
| CEP290-830 | + | AACAUGACUCAUAAUUUAG | 19 | upstream |
| | | (SEQ ID NO: 1641) | | |
| CEP290-831 | + | ACAUGACUCAUAAUUUAG | 18 | upstream |
| | | (SEQ ID NO: 1642) | | |
| CEP290-832 | − | ACAGGUAGAAUAUUGUAAUCAAAG | 24 | upstream |
| | | (SEQ ID NO: 1643) | | |
| CEP290-833 | − | AGGUAGAAUAUUGUAAUCAAAG | 22 | upstream |
| | | (SEQ ID NO: 1644) | | |
| CEP290-834 | − | AGAAUAUUGUAAUCAAAG | 18 | upstream |
| | | (SEQ ID NO: 1645) | | |
| CEP290-835 | + | AUAGUUUGUUCUGGGUACAGGGGU | 24 | upstream |
| | | (SEQ ID NO: 1646) | | |
| CEP290-836 | + | AGUUUGUUCUGGGUACAGGGGU | 22 | upstream |
| | | (SEQ ID NO: 1647) | | |
| CEP290-837 | − | AGACAUCUAAGAGAAAAAGGAGC | 23 | upstream |
| | | (SEQ ID NO: 1648) | | |
| CEP290-838 | − | ACAUCUAAGAGAAAAAGGAGC | 21 | upstream |
| | | (SEQ ID NO: 1649) | | |
| CEP290-839 | − | AUCUAAGAGAAAAAGGAGC | 19 | upstream |
| | | (SEQ ID NO: 1650) | | |
| CEP290-840 | + | AGAGGAUAGGACAGAGGACA | 20 | upstream |
| | | (SEQ ID NO: 735) | | |
| CEP290-841 | + | AGGAUAGGACAGAGGACA | 18 | upstream |
| | | (SEQ ID NO: 1652) | | |
| CEP290-842 | + | AGGAAAGAUGAAAAAUACUCUU | 22 | upstream |
| | | (SEQ ID NO: 1653) | | |
| CEP290-843 | + | AAAGAUGAAAAAUACUCUU | 19 | upstream |
| | | (SEQ ID NO: 1654) | | |
| CEP290-844 | + | AAGAUGAAAAAUACUCUU | 18 | upstream |
| | | (SEQ ID NO: 1655) | | |
| CEP290-845 | + | AGGAAAGAUGAAAAAUACUCUUU | 23 | upstream |
| | | (SEQ ID NO: 1656) | | |
| CEP290-846 | + | AAAGAUGAAAAAUACUCUUU | 20 | upstream |
| | | (SEQ ID NO: 737) | | |
| CEP290-847 | + | AAGAUGAAAAAUACUCUUU | 19 | upstream |
| | | (SEQ ID NO: 1658) | | |
| CEP290-848 | + | AGAUGAAAAAUACUCUUU | 18 | upstream |
| | | (SEQ ID NO: 1659) | | |
| CEP290-849 | + | AGGAAAGAUGAAAAAUACUCU | 21 | upstream |
| | | (SEQ ID NO: 1660) | | |
| CEP290-850 | + | AAAGAUGAAAAAUACUCU | 18 | upstream |
| | | (SEQ ID NO: 1661) | | |
| CEP290-851 | + | AUAGGACAGAGGACAUGGAGAA | 22 | upstream |
| | | (SEQ ID NO: 1662) | | |
| CEP290-852 | + | AGGACAGAGGACAUGGAGAA | 20 | upstream |
| | | (SEQ ID NO: 736) | | |
| CEP290-853 | + | AGGAUAGGACAGAGGACAUGGAGA | 24 | upstream |
| | | (SEQ ID NO: 1664) | | |
| CEP290-854 | + | AUAGGACAGAGGACAUGGAGA | 21 | upstream |
| | | (SEQ ID NO: 1665) | | |
| CEP290-855 | + | AGGACAGAGGACAUGGAGA | 19 | upstream |
| | | (SEQ ID NO: 1666) | | |
| CEP290-856 | + | AAGGAACAAAAGCCAGGGACCAU | 23 | upstream |
| | | (SEQ ID NO: 1667) | | |
| CEP290-857 | + | AGGAACAAAAGCCAGGGACCAU | 22 | upstream |
| | | (SEQ ID NO: 1668) | | |
| CEP290-858 | + | AACAAAAGCCAGGGACCAU | 19 | upstream |
| | | (SEQ ID NO: 1669) | | |
| CEP290-859 | + | ACAAAAGCCAGGGACCAU | 18 | upstream |
| | | (SEQ ID NO: 1670) | | |
| CEP290-860 | + | ACAUUUAUUCUACAAUAAAAAAUG | 24 | upstream |
| | | (SEQ ID NO: 1671) | | |
| CEP290-861 | + | AUUUAUUCUACAAUAAAAAAUG | 22 | upstream |
| | | (SEQ ID NO: 1672) | | |
| CEP290-862 | + | AUUCUACAAUAAAAAAUG | 18 | upstream |
| | | (SEQ ID NO: 1673) | | |
| CEP290-863 | + | AUUGUGUGUGUGUGUGUGUGUUAU | 24 | upstream |
| | | (SEQ ID NO: 1674) | | |
| CEP290-864 | + | CUACUGUUGGCUACAUCCAUUCC | 23 | upstream |
| | | (SEQ ID NO: 1675) | | |
| CEP290-865 | + | CUGUUGGCUACAUCCAUUCC | 20 | upstream |
| | | (SEQ ID NO: 1676) | | |
| CEP290-866 | + | CAGAGUGCAUCCAUGGUC | 18 | upstream |
| | | (SEQ ID NO: 1677) | | |
| CEP290-867 | − | CUCCAGCAUUAGAAAGUCCUAGGC | 24 | upstream |
| | | (SEQ ID NO: 1678) | | |
| CEP290-868 | − | CCAGCAUUAGAAAGUCCUAGGC | 22 | upstream |
| | | (SEQ ID NO: 1679) | | |
| CEP290-869 | − | CAGCAUUAGAAAGUCCUAGGC | 21 | upstream |
| | | (SEQ ID NO: 1680) | | |
| CEP290-870 | − | CAUUAGAAAGUCCUAGGC | 18 | upstream |
| | | (SEQ ID NO: 1681) | | |
| CEP290-871 | − | CCCAUGGUCCCUGGCUUUUGUUCC | 24 | upstream |
| | | (SEQ ID NO: 1682) | | |
| CEP290-872 | − | CCAUGGUCCCUGGCUUUUGUUCC | 23 | upstream |
| | | (SEQ ID NO: 1683) | | |
| CEP290-873 | − | CAUGGUCCCUGGCUUUUGUUCC | 22 | upstream |
| | | (SEQ ID NO: 1684) | | |
| CEP290-874 | − | CUCAUAGAGACACAUUCAGUAA | 22 | upstream |
| | | (SEQ ID NO: 1685) | | |
| CEP290-875 | − | CAUAGAGACACAUUCAGUAA | 20 | upstream |
| | | (SEQ ID NO: 750) | | |
| CEP290-876 | − | CUCAAAAGCUUUUGCUGGCUCA | 22 | upstream |
| | | (SEQ ID NO: 1687) | | |
| CEP290-877 | − | CAAAAGCUUUUGCUGGCUCA | 20 | upstream |
| | | (SEQ ID NO: 762) | | |
| CEP290-878 | + | CCAUAAGCCUCUAUUUCUGAU | 21 | upstream |
| | | (SEQ ID NO: 1689) | | |
| CEP290-879 | + | CAUAAGCCUCUAUUUCUGAU | 20 | upstream |
| | | (SEQ ID NO: 851) | | |
| CEP290-880 | + | CAGCUAAAUCAUGCAAGUGACCUA | 24 | upstream |
| | | (SEQ ID NO: 1691) | | |
| CEP290-881 | + | CUAAAUCAUGCAAGUGACCUA | 21 | upstream |
| | | (SEQ ID NO: 1692) | | |
| CEP290-882 | − | CAAACCUCUUUUAACCAGACAUCU | 24 | upstream |
| | | (SEQ ID NO: 1693) | | |
| CEP290-883 | − | CCUCUUUUAACCAGACAUCU | 20 | upstream |
| | | (SEQ ID NO: 1694) | | |
| CEP290-884 | − | CUCUUUUAACCAGACAUCU | 19 | upstream |
| | | (SEQ ID NO: 1695) | | |
| CEP290-885 | + | CUCAUAAUUUAGUAGGAAUC | 20 | upstream |
| | | (SEQ ID NO: 864) | | |
| CEP290-886 | + | CAUAAUUUAGUAGGAAUC | 18 | upstream |
| | | (SEQ ID NO: 1697) | | |
| CEP290-887 | + | CACCUCUCUUUGGCAAAAGCAG | 22 | upstream |
| | | (SEQ ID NO: 1698) | | |
| CEP290-888 | + | CCUCUCUUUGGCAAAAGCAG | 20 | upstream |
| | | (SEQ ID NO: 859) | | |
| CEP290-889 | + | CUCUCUUUGGCAAAAGCAG | 19 | upstream |
| | | (SEQ ID NO: 1700) | | |
| CEP290-890 | − | CAGGUAGAAUAUUGUAAUCAAAGG | 24 | upstream |
| | | (SEQ ID NO: 1701) | | |
| CEP290-891 | + | CCAAGGAACAAAAGCCAGGGACC | 23 | upstream |
| | | (SEQ ID NO: 1702) | | |
| CEP290-892 | + | CAAGGAACAAAAGCCAGGGACC | 22 | upstream |
| | | (SEQ ID NO: 1703) | | |
| CEP290-893 | + | CAUCCAUUCCAAGGAACAAAAGC | 23 | upstream |
| | | (SEQ ID NO: 1704) | | |
| CEP290-894 | + | CCAUUCCAAGGAACAAAAGC | 20 | upstream |
| | | (SEQ ID NO: 1705) | | |
| CEP290-895 | + | CAUUCCAAGGAACAAAAGC | 19 | upstream |
| | | (SEQ ID NO: 1706) | | |
| CEP290-896 | + | CUCUUGCCUAGGACUUUCUAAUGC | 24 | upstream |
| | | (SEQ ID NO: 1707) | | |
| CEP290-897 | + | CUUGCCUAGGACUUUCUAAUGC | 22 | upstream |
| | | (SEQ ID NO: 1708) | | |
| CEP290-898 | + | CCUAGGACUUUCUAAUGC | 18 | upstream |
| | | (SEQ ID NO: 1709) | | |
| CEP290-899 | − | CCUGAUUUGUUCAUCUUCCUCAU | 23 | upstream |
| | | (SEQ ID NO: 1710) | | |
| CEP290-900 | − | CUGAUUUGUUCAUCUUCCUCAU | 22 | upstream |
| | | (SEQ ID NO: 1711) | | |
| CEP290-901 | − | CCUCUUUUAACCAGACAUCUAA | 22 | upstream |
| | | (SEQ ID NO: 1712) | | |
| CEP290-902 | − | CUCUUUUAACCAGACAUCUAA | 21 | upstream |
| | | (SEQ ID NO: 1713) | | |
| CEP290-903 | − | CUUUUAACCAGACAUCUAA | 19 | upstream |
| | | (SEQ ID NO: 1714) | | |
| CEP290-904 | − | CCUCUGUCCUAUCCUCUCCAGCAU | 24 | upstream |
| | | (SEQ ID NO: 1715) | | |
| CEP290-905 | − | CUCUGUCCUAUCCUCUCCAGCAU | 23 | upstream |
| | | (SEQ ID NO: 1716) | | |
| CEP290-906 | − | CUGUCCUAUCCUCUCCAGCAU | 21 | upstream |
| | | (SEQ ID NO: 1717) | | |
| CEP290-907 | − | CAGGUAGAAUAUUGUAAUCAAAG | 23 | upstream |
| | | (SEQ ID NO: 1718) | | |
| CEP290-908 | | CUGGGUACAGGGGUAAGAGA | 20 | upstream |
| | | (SEQ ID NO: 1719) | | |
| CEP290-909 | − | CUUUCUGCUGCUUUUGCCA | 19 | upstream |
| | | (SEQ ID NO: 1720) | | |
| CEP290-910 | − | CAGACAUCUAAGAGAAAAAGGAGC | 24 | upstream |
| | | (SEQ ID NO: 1721) | | |
| CEP290-911 | − | CAUCUAAGAGAAAAAGGAGC | 20 | upstream |
| | | (SEQ ID NO: 1722) | | |
| CEP290-912 | + | CUGGAGAGGAUAGGACAGAGGACA | 24 | upstream |
| | | (SEQ ID NO: 1723) | | |
| CEP290-913 | + | CAAGGAACAAAAGCCAGGGACCAU | 24 | upstream |
| | | (SEQ ID NO: 1724) | | |
| CEP290-914 | + | CAUUUAUUCUACAAUAAAAAAUG | 23 | upstream |
| | | (SEQ ID NO: 1725) | | |
| CEP290-915 | + | GCUACUGUUGGCUACAUCCAUUCC | 24 | upstream |
| | | (SEQ ID NO: 1726) | | |
| CEP290-916 | + | GUUGGCUACAUCCAUUCC | 18 | upstream |
| | | (SEQ ID NO: 1727) | | |
| CEP290-917 | − | GCAUUAGAAAGUCCUAGGC | 19 | upstream |
| | | (SEQ ID NO: 1728) | | |
| CEP290-918 | − | GGUCCCUGGCUUUUGUUCC | 19 | upstream |
| | | (SEQ ID NO: 1729) | | |
| CEP290-919 | − | GUCCCUGGCUUUUGUUCC | 18 | upstream |
| | | (SEQ ID NO: 1730) | | |
| CEP290-920 | − | GGCUCAUAGAGACACAUUCAGUAA | 24 | upstream |
| | | (SEQ ID NO: 1731) | | |
| CEP290-921 | − | GCUCAUAGAGACACAUUCAGUAA | 23 | upstream |
| | | (SEQ ID NO: 1732) | | |
| CEP290-922 | − | GCUCAAAAGCUUUUGCUGGCUCA | 23 | upstream |
| | | (SEQ ID NO: 1733) | | |
| CEP290-923 | + | GCUAAAUCAUGCAAGUGACCUA | 22 | upstream |
| | | (SEQ ID NO: 1734) | | |
| CEP290-924 | + | GUUUGUUCUGGGUACAGGGGUAA | 23 | upstream |
| | | (SEQ ID NO: 1735) | | |
| CEP290-925 | + | GUUCUGGGUACAGGGGUAA | 19 | upstream |
| | | (SEQ ID NO: 1736) | | |
| CEP290-926 | + | GACUCAUAAUUUAGUAGGAAUC | 22 | upstream |
| | | (SEQ ID NO: 1737) | | |
| CEP290-927 | − | GGAAUGGAUGUAGCCAACAGUAG | 23 | upstream |
| | | (SEQ ID NO: 1738) | | |
| CEP290-928 | − | GAAUGGAUGUAGCCAACAGUAG | 22 | upstream |
| | | (SEQ ID NO: 1739) | | |
| CEP290-929 | − | GGAUGUAGCCAACAGUAG | 18 | upstream |
| | | (SEQ ID NO: 1740) | | |
| CEP290-930 | − | GGUAGAAUAUUGUAAUCAAAGG | 22 | upstream |
| | | (SEQ ID NO: 1741) | | |
| CEP290-931 | − | GUAGAAUAUUGUAAUCAAAGG | 21 | upstream |
| | | (SEQ ID NO: 1742) | | |
| CEP290-932 | − | GAAUAUUGUAAUCAAAGG | 18 | upstream |
| | | (SEQ ID NO: 1743) | | |
| CEP290-933 | + | GGAACAAAAGCCAGGGACC | 19 | upstream |
| | | (SEQ ID NO: 1744) | | |
| CEP290-934 | + | GAACAAAAGCCAGGGACC | 18 | upstream |
| | | (SEQ ID NO: 1745) | | |
| CEP290-935 | + | GAAUUAGAUCUUAUUCUACUCCU | 23 | upstream |
| | | (SEQ ID NO: 1746) | | |
| CEP290-936 | + | GCCUAGGACUUUCUAAUGC | 19 | upstream |
| | | (SEQ ID NO: 1747) | | |
| CEP290-937 | − | GAUUUGUUCAUCUUCCUCAU | 20 | upstream |
| | | (SEQ ID NO: 774) | | |
| CEP290-938 | − | GAGAGGUGAUUAUGUUACUUUUUA | 24 | upstream |
| | | (SEQ ID NO: 1749) | | |
| CEP290-939 | − | GAGGUGAUUAUGUUACUUUUUA | 22 | upstream |
| | | (SEQ ID NO: 1750) | | |
| CEP290-940 | − | GGUGAUUAUGUUACUUUUUA | 20 | upstream |
| | | (SEQ ID NO: 780) | | |
| CEP290-941 | − | GUGAUUAUGUUACUUUUUA | 19 | upstream |
| | | (SEQ ID NO: 1752) | | |
| CEP290-942 | − | GUCCUAUCCUCUCCAGCAU | 19 | upstream |
| | | (SEQ ID NO: 1753) | | |
| CEP290-943 | + | GAUAAACAUGACUCAUAAUUUAG | 23 | upstream |
| | | (SEQ ID NO: 1754) | | |
| CEP290-944 | − | GGUAGAAUAUUGUAAUCAAAG | 21 | upstream |
| | | (SEQ ID NO: 1755) | | |
| CEP290-945 | − | GUAGAAUAUUGUAAUCAAAG | 20 | upstream |
| | | (SEQ ID NO: 1756) | | |
| CEP290-946 | + | GUUCUGGGUACAGGGGUAAGAGA | 23 | upstream |
| | | (SEQ ID NO: 1757) | | |
| CEP290-947 | + | GGGUACAGGGGUAAGAGA | 18 | upstream |
| | | (SEQ ID NO: 1758) | | |
| CEP290-948 | + | GUUUGUUCUGGGUACAGGGGU | 21 | upstream |
| | | (SEQ ID NO: 1759) | | |
| CEP290-949 | − | GUUUGCUUUCUGCUGCUUUUGCCA | 24 | upstream |
| | | (SEQ ID NO: 1760) | | |
| CEP290-950 | − | GCUUUCUGCUGCUUUUGCCA | 20 | upstream |
| | | (SEQ ID NO: 776) | | |
| CEP290-951 | − | GACAUCUAAGAGAAAAAGGAGC | 22 | upstream |
| | | (SEQ ID NO: 1762) | | |
| CEP290-952 | + | GGAGAGGAUAGGACAGAGGACA | 22 | upstream |
| | | (SEQ ID NO: 1763) | | |
| CEP290-953 | + | GAGAGGAUAGGACAGAGGACA | 21 | upstream |
| | | (SEQ ID NO: 1764) | | |
| CEP290-954 | + | GAGGAUAGGACAGAGGACA | 19 | upstream |
| | | (SEQ ID NO: 1765) | | |
| CEP290-955 | + | GGAAAGAUGAAAAAUACUCUU | 21 | upstream |
| | | (SEQ ID NO: 1766) | | |
| CEP290-956 | + | GAAAGAUGAAAAAUACUCUU | 20 | upstream |
| | | (SEQ ID NO: 462) | | |
| CEP290-957 | + | GGAAAGAUGAAAAAUACUCUUU | 22 | upstream |
| | | (SEQ ID NO: 1767) | | |
| CEP290-958 | + | GAAAGAUGAAAAAUACUCUUU | 21 | upstream |
| | | (SEQ ID NO: 1768) | | |
| CEP290-959 | + | GGAAAGAUGAAAAAUACUCU | 20 | upstream |
| | | (SEQ ID NO: 778) | | |
| CEP290-960 | + | GAAAGAUGAAAAAUACUCU | 19 | upstream |
| | | (SEQ ID NO: 1770) | | |
| CEP290-961 | + | GGAUAGGACAGAGGACAUGGAGAA | 24 | upstream |
| | | (SEQ ID NO: 1771) | | |
| CEP290-962 | + | GAUAGGACAGAGGACAUGGAGAA | 23 | upstream |
| | | (SEQ ID NO: 1772) | | |
| CEP290-963 | + | GGACAGAGGACAUGGAGAA | 19 | upstream |
| | | (SEQ ID NO: 1773) | | |
| CEP290-964 | + | GACAGAGGACAUGGAGAA | 18 | upstream |
| | | (SEQ ID NO: 1774) | | |
| CEP290-965 | + | GGAUAGGACAGAGGACAUGGAGA | 23 | upstream |
| | | (SEQ ID NO: 1775) | | |
| CEP290-966 | + | GAUAGGACAGAGGACAUGGAGA | 22 | upstream |
| | | (SEQ ID NO: 1776) | | |
| CEP290-967 | + | GGACAGAGGACAUGGAGA | 18 | upstream |
| | | (SEQ ID NO: 1777) | | |
| CEP290-968 | + | GGAACAAAAGCCAGGGACCAU | 21 | upstream |
| | | (SEQ ID NO: 1778) | | |
| CEP290-969 | + | GAACAAAAGCCAGGGACCAU | 20 | upstream |
| | | (SEQ ID NO: 465) | | |
| CEP290-970 | + | GUGUGUGUGUGUGUGUGUUAU | 21 | upstream |
| | | (SEQ ID NO: 1779) | | |
| CEP290-971 | + | GUGUGUGUGUGUGUGUUAU | 19 | upstream |
| | | (SEQ ID NO: 1780) | | |
| CEP290-972 | + | GUGUGUGUGUGUGUGUGUUAUG | 22 | upstream |
| | | (SEQ ID NO: 1781) | | |
| CEP290-973 | + | GUGUGUGUGUGUGUGUUAUG | 20 | upstream |
| | | (SEQ ID NO: 1154) | | |
| CEP290-974 | + | GUGUGUGUGUGUGUUAUG | 18 | upstream |
| | | (SEQ ID NO: 1783) | | |
| CEP290-975 | + | UACUGUUGGCUACAUCCAUUCC | 22 | upstream |
| | | (SEQ ID NO: 1784) | | |
| CEP290-976 | + | UGUUGGCUACAUCCAUUCC | 19 | upstream |
| | | (SEQ ID NO: 1785) | | |
| CEP290-977 | + | UUUACAGAGUGCAUCCAUGGUC | 22 | upstream |
| | | (SEQ ID NO: 1786) | | |
| CEP290-978 | + | UUACAGAGUGCAUCCAUGGUC | 21 | upstream |
| | | (SEQ ID NO: 1787) | | |
| CEP290-979 | + | UACAGAGUGCAUCCAUGGUC | 20 | upstream |
| | | (SEQ ID NO: 1788) | | |
| CEP290-980 | − | UCCAGCAUUAGAAAGUCCUAGGC | 23 | upstream |
| | | (SEQ ID NO: 1789) | | |
| CEP290-981 | − | UGGUCCCUGGCUUUUGUUCC | 20 | upstream |
| | | (SEQ ID NO: 1790) | | |
| CEP290-982 | − | UCAUAGAGACACAUUCAGUAA | 21 | upstream |
| | | (SEQ ID NO: 1791) | | |
| CEP290-983 | − | UAGAGACACAUUCAGUAA | 18 | upstream |
| | | (SEQ ID NO: 1792) | | |
| CEP290-984 | − | UCAAAAGCUUUUGCUGGCUCA | 21 | upstream |
| | | (SEQ ID NO: 1793) | | |
| CEP290-985 | + | UCCAUAAGCCUCUAUUUCUGAU | 22 | upstream |
| | | (SEQ ID NO: 1794) | | |
| CEP290-986 | + | UAAGCCUCUAUUUCUGAU | 18 | upstream |
| | | (SEQ ID NO: 1795) | | |
| CEP290-987 | + | UAAAUCAUGCAAGUGACCUA | 20 | upstream |
| | | (SEQ ID NO: 508) | | |
| CEP290-988 | − | UCUUUUAACCAGACAUCU | 18 | upstream |
| | | (SEQ ID NO: 1796) | | |
| CEP290-989 | + | UUUGUUCUGGGUACAGGGGUAA | 22 | upstream |
| | | (SEQ ID NO: 1797) | | |
| CEP290-990 | + | UUGUUCUGGGUACAGGGGUAA | 21 | upstream |
| | | (SEQ ID NO: 1798) | | |
| CEP290-991 | + | UGUUCUGGGUACAGGGGUAA | 20 | upstream |
| | | (SEQ ID NO: 1799) | | |
| CEP290-992 | + | UUCUGGGUACAGGGGUAA | 18 | upstream |
| | | (SEQ ID NO: 1800) | | |
| CEP290-993 | + | UGACUCAUAAUUUAGUAGGAAUC | 23 | upstream |
| | | (SEQ ID NO: 1801) | | |
| CEP290-994 | + | UCAUAAUUUAGUAGGAAUC | 19 | upstream |
| | | (SEQ ID NO: 1802) | | |
| CEP290-995 | − | UGGAAUGGAUGUAGCCAACAGUAG | 24 | upstream |
| | | (SEQ ID NO: 1803) | | |
| CEP290-996 | − | UGGAUGUAGCCAACAGUAG | 19 | upstream |
| | | (SEQ ID NO: 1804) | | |
| CEP290-997 | + | UCACCUCUCUUUGGCAAAAGCAG | 23 | upstream |
| | | (SEQ ID NO: 1805) | | |
| CEP290-998 | + | UCUCUUUGGCAAAAGCAG | 18 | upstream |
| | | (SEQ ID NO: 1806) | | |
| CEP290-999 | − | UAGAAUAUUGUAAUCAAAGG | 20 | upstream |
| | | (SEQ ID NO: 1807) | | |
| CEP290-1000 | + | UCCAAGGAACAAAAGCCAGGGACC | 24 | upstream |
| | | (SEQ ID NO: 1808) | | |
| CEP290-1001 | + | UCCAUUCCAAGGAACAAAAGC | 21 | upstream |
| | | (SEQ ID NO: 1809) | | |
| CEP290-1002 | + | UUAGAUCUUAUUCUACUCCU | 20 | upstream |
| | | (SEQ ID NO: 902) | | |
| CEP290-1003 | + | UAGAUCUUAUUCUACUCCU | 19 | upstream |
| | | (SEQ ID NO: 1811) | | |
| CEP290-1004 | + | UCUUGCCUAGGACUUUCUAAUGC | 23 | upstream |
| | | (SEQ ID NO: 1812) | | |
| CEP290-1005 | + | UUGCCUAGGACUUUCUAAUGC | 21 | upstream |
| | | (SEQ ID NO: 1813) | | |
| CEP290-1006 | + | UGCCUAGGACUUUCUAAUGC | 20 | upstream |
| | | (SEQ ID NO: 632) | | |
| CEP290-1007 | − | UCCUGAUUUGUUCAUCUUCCUCAU | 24 | upstream |
| | | (SEQ ID NO: 1814) | | |
| CEP290-1008 | − | UGAUUUGUUCAUCUUCCUCAU | 21 | upstream |
| | | (SEQ ID NO: 1815) | | |
| CEP290-1009 | − | UUUGUUCAUCUUCCUCAU | 18 | upstream |
| | | (SEQ ID NO: 1816) | | |
| CEP290-1010 | − | UGAUUAUGUUACUUUUUA | 18 | upstream |
| | | (SEQ ID NO: 1817) | | |
| CEP290-1011 | − | UCUUUUAACCAGACAUCUAA | 20 | upstream |
| | | (SEQ ID NO: 1818) | | |
| CEP290-1012 | − | UUUUAACCAGACAUCUAA | 18 | upstream |
| | | (SEQ ID NO: 1819) | | |
| CEP290-1013 | − | UCUGUCCUAUCCUCUCCAGCAU | 22 | upstream |
| | | (SEQ ID NO: 1820) | | |
| CEP290-1014 | − | UGUCCUAUCCUCUCCAGCAU | 20 | upstream |
| | | (SEQ ID NO: 899) | | |
| CEP290-1015 | − | UCCUAUCCUCUCCAGCAU | 18 | upstream |
| | | (SEQ ID NO: 1822) | | |
| CEP290-1016 | + | UGAUAAACAUGACUCAUAAUUUAG | 24 | upstream |
| | | (SEQ ID NO: 1823) | | |
| CEP290-1017 | + | UAAACAUGACUCAUAAUUUAG | 21 | upstream |
| | | (SEQ ID NO: 1824) | | |
| CEP290-1018 | − | UAGAAUAUUGUAAUCAAAG | 19 | upstream |
| | | (SEQ ID NO: 1825) | | |
| CEP290-1019 | + | UGUUCUGGGUACAGGGGUAAGAGA | 24 | upstream |
| | | (SEQ ID NO: 1826) | | |
| CEP290-1020 | + | UUCUGGGUACAGGGGUAAGAGA | 22 | upstream |
| | | (SEQ ID NO: 1827) | | |
| CEP290-1021 | + | UCUGGGUACAGGGGUAAGAGA | 21 | upstream |
| | | (SEQ ID NO: 1828) | | |
| CEP290-1022 | + | UGGGUACAGGGGUAAGAGA | 19 | upstream |
| | | (SEQ ID NO: 1829) | | |
| CEP290-1023 | + | UAGUUUGUUCUGGGUACAGGGGU | 23 | upstream |
| | | (SEQ ID NO: 1830) | | |
| CEP290-1024 | + | UUUGUUCUGGGUACAGGGGU | 20 | upstream |
| | | (SEQ ID NO: 1831) | | |
| CEP290-1025 | + | UUGUUCUGGGUACAGGGGU | 19 | upstream |
| | | (SEQ ID NO: 1832) | | |
| CEP290-1026 | + | UGUUCUGGGUACAGGGGU | 18 | upstream |
| | | (SEQ ID NO: 1833) | | |
| CEP290-1027 | − | UUUGCUUUCUGCUGCUUUUGCCA | 23 | upstream |
| | | (SEQ ID NO: 1834) | | |
| CEP290-1028 | + | UUGCUUUCUGCUGCUUUUGCCA | 22 | upstream |
| | | (SEQ ID NO: 1835) | | |
| CEP290-1029 | + | UGCUUUCUGCUGCUUUUGCCA | 21 | upstream |
| | | (SEQ ID NO: 1836) | | |
| CEP290-1030 | + | UUUCUGCUGCUUUUGCCA | 18 | upstream |
| | | (SEQ ID NO: 1837) | | |
| CEP290-1031 | + | UCUAAGAGAAAAAGGAGC | 18 | upstream |
| | | (SEQ ID NO: 1838) | | |
| CEP290-1032 | + | UGGAGAGGAUAGGACAGAGGACA | 23 | upstream |
| | | (SEQ ID NO: 1839) | | |
| CEP290-1033 | + | UUAGGAAAGAUGAAAAAUACUCUU | 24 | upstream |
| | | (SEQ ID NO: 1840) | | |
| CEP290-1034 | + | UAGGAAAGAUGAAAAAUACUCUU | 23 | upstream |
| | | (SEQ ID NO: 1841) | | |
| CEP290-1035 | + | UAGGAAAGAUGAAAAAUACUCUUU | 24 | upstream |
| | | (SEQ ID NO: 1842) | | |
| CEP290-1036 | + | UUUAGGAAAGAUGAAAAAUACUCU | 24 | upstream |
| | | (SEQ ID NO: 1843) | | |
| CEP290-1037 | + | UUAGGAAAGAUGAAAAAUACUCU | 23 | upstream |
| | | (SEQ ID NO: 1844) | | |
| CEP290-1038 | + | UAGGAAAGAUGAAAAAUACUCU | 22 | upstream |
| | | (SEQ ID NO: 1845) | | |
| CEP290-1039 | + | UAGGACAGAGGACAUGGAGAA | 21 | upstream |
| | | (SEQ ID NO: 1846) | | |
| CEP290-1040 | + | UAGGACAGAGGACAUGGAGA | 20 | upstream |
| | | (SEQ ID NO: 881) | | |
| CEP290-1041 | + | UUUAUUCUACAAUAAAAAAUG | 21 | upstream |
| | | (SEQ ID NO: 1848) | | |
| CEP290-1042 | + | UUAUUCUACAAUAAAAAAUG | 20 | upstream |
| | | (SEQ ID NO: 1849) | | |
| CEP290-1043 | + | UAUUCUACAAUAAAAAAUG | 19 | upstream |
| | | (SEQ ID NO: 1850) | | |
| CEP290-1044 | + | UUGUGUGUGUGUGUGUGUGUUAU | 23 | upstream |
| | | (SEQ ID NO: 1851) | | |
| CEP290-1045 | + | UGUGUGUGUGUGUGUGUGUUAU | 22 | upstream |
| | | (SEQ ID NO: 1852) | | |
| CEP290-1046 | + | UGUGUGUGUGUGUGUGUUAU | 20 | upstream |
| | | (SEQ ID NO: 1853) | | |
| CEP290-1047 | + | UGUGUGUGUGUGUGUUAU | 18 | upstream |
| | | (SEQ ID NO: 1854) | | |
| CEP290-1048 | + | UUGUGUGUGUGUGUGUGUGUUAUG | 24 | upstream |
| | | (SEQ ID NO: 1855) | | |
| CEP290-1049 | + | UGUGUGUGUGUGUGUGUGUUAUG | 23 | upstream |
| | | (SEQ ID NO: 1856) | | |
| CEP290-1050 | + | UGUGUGUGUGUGUGUGUUAUG | 21 | upstream |
| | | (SEQ ID NO: 1857) | | |
| CEP290-1051 | + | UGUGUGUGUGUGUGUUAUG | 19 | upstream |
| | | (SEQ ID NO: 1858) | | |
| CEP290-1052 | + | ACUGUUGGCUACAUCCAUUCCA | 22 | upstream |
| | | (SEQ ID NO: 1859) | | |
| CEP290-1053 | + | AUUAUCCACAAGAUGUCUCUUGCC | 24 | upstream |
| | | (SEQ ID NO: 1860) | | |
| CEP290-1054 | + | AUCCACAAGAUGUCUCUUGCC | 21 | upstream |
| | | (SEQ ID NO: 1861) | | |
| CEP290-1055 | + | AUGAGCCAGCAAAAGCUU | 18 | upstream |
| | | (SEQ ID NO: 1862) | | |
| CEP290-1056 | + | ACAGAGUGCAUCCAUGGUCCAGG | 23 | upstream |
| | | (SEQ ID NO: 1863) | | |
| CEP290-1057 | + | AGAGUGCAUCCAUGGUCCAGG | 21 | upstream |
| | | (SEQ ID NO: 1864) | | |
| CEP290-1058 | + | AGUGCAUCCAUGGUCCAGG | 19 | upstream |
| | | (SEQ ID NO: 1865) | | |
| CEP290-1059 | − | AGCUGAAAUAUUAAGGGCUCUUC | 23 | upstream |
| | | (SEQ ID NO: 1866) | | |
| CEP290-1060 | − | AAAUAUUAAGGGCUCUUC | 18 | upstream |
| | | (SEQ ID NO: 1867) | | |
| CEP290-1061 | − | AACUCUAUACCUUUUACUGAGGA | 23 | upstream |
| | | (SEQ ID NO: 1868) | | |
| CEP290-1062 | − | ACUCUAUACCUUUUACUGAGGA | 22 | upstream |
| | | (SEQ ID NO: 1869) | | |
| CEP290-1063 | − | ACUUGAACUCUAUACCUUUUACU | 23 | upstream |
| | | (SEQ ID NO: 1870) | | |
| CEP290-1064 | − | AACUCUAUACCUUUUACU | 18 | upstream |
| | | (SEQ ID NO: 1871) | | |
| CEP290-1065 | + | AGUAGGAAUCCUGAAAGCUACU | 22 | upstream |
| | | (SEQ ID NO: 1872) | | |
| CEP290-1066 | + | AGGAAUCCUGAAAGCUACU | 19 | upstream |
| | | (SEQ ID NO: 1873) | | |
| CEP290-1067 | − | AGCCAACAGUAGCUGAAAUAUU | 22 | upstream |
| | | (SEQ ID NO: 1874) | | |
| CEP290-1068 | − | AACAGUAGCUGAAAUAUU | 18 | upstream |
| | | (SEQ ID NO: 1875) | | |
| CEP290-1069 | + | AUCCAUUCCAAGGAACAAAAGCC | 23 | upstream |
| | | (SEQ ID NO: 1876) | | |
| CEP290-1070 | + | AUUCCAAGGAACAAAAGCC | 19 | upstream |
| | | (SEQ ID NO: 1877) | | |
| CEP290-1071 | − | AUCCCUUUCUCUUACCCCUGUACC | 24 | upstream |
| | | (SEQ ID NO: 1878) | | |
| CEP290-1072 | + | AGGACUUUCUAAUGCUGGAGAGGA | 24 | upstream |
| | | (SEQ ID NO: 1879) | | |
| CEP290-1073 | + | ACUUUCUAAUGCUGGAGAGGA | 21 | upstream |
| | | (SEQ ID NO: 1880) | | |
| CEP290-1074 | + | AAUGCUGGAGAGGAUAGGACA | 21 | upstream |
| | | (SEQ ID NO: 1881) | | |
| CEP290-1075 | + | AUGCUGGAGAGGAUAGGACA | 20 | upstream |
| | | (SEQ ID NO: 838) | | |
| CEP290-1076 | + | AUCAUAAGUUACAAUCUGUGAAU | 23 | upstream |
| | | (SEQ ID NO: 1883) | | |
| CEP290-1077 | + | AUAAGUUACAAUCUGUGAAU | 20 | upstream |
| | | (SEQ ID NO: 1884) | | |
| CEP290-1078 | + | AAGUUACAAUCUGUGAAU | 18 | upstream |
| | | (SEQ ID NO: 1885) | | |
| CEP290-1079 | + | AACCAGACAUCUAAGAGAAAA | 21 | upstream |
| | | (SEQ ID NO: 1886) | | |
| CEP290-1080 | + | ACCAGACAUCUAAGAGAAAA | 20 | upstream |
| | | (SEQ ID NO: 1087) | | |
| CEP290-1081 | + | AAGCCUCUAUUUCUGAUGAGGAAG | 24 | upstream |
| | | (SEQ ID NO: 1888) | | |
| CEP290-1082 | + | AGCCUCUAUUUCUGAUGAGGAAG | 23 | upstream |
| | | (SEQ ID NO: 1889) | | |
| CEP290-1083 | + | AUGAGGAAGAUGAACAAAUC | 20 | upstream |
| | | (SEQ ID NO: 733) | | |
| CEP290-1084 | + | AUUUACUGAAUGUGUCUCU | 19 | upstream |
| | | (SEQ ID NO: 1891) | | |
| CEP290-1085 | + | ACAGGGGUAAGAGAAAGGG | 19 | upstream |
| | | (SEQ ID NO: 1892) | | |
| CEP290-1086 | + | CUACUGUUGGCUACAUCCAUUCCA | 24 | upstream |
| | | (SEQ ID NO: 1893) | | |
| CEP290-1087 | + | CUGUUGGCUACAUCCAUUCCA | 21 | upstream |
| | | (SEQ ID NO: 1894) | | |
| CEP290-1088 | + | CCACAAGAUGUCUCUUGCC | 19 | upstream |
| | | (SEQ ID NO: 1895) | | |
| CEP290-1089 | + | CACAAGAUGUCUCUUGCC | 18 | upstream |
| | | (SEQ ID NO: 1896) | | |
| CEP290-1090 | + | CCUUUGUAGUUAUCUUACAGCCAC | 24 | upstream |
| | | (SEQ ID NO: 1897) | | |
| CEP290-1091 | + | CUUUGUAGUUAUCUUACAGCCAC | 23 | upstream |
| | | (SEQ ID NO: 1898) | | |
| CEP290-1092 | + | CUCUAUGAGCCAGCAAAAGCUU | 22 | upstream |
| | | (SEQ ID NO: 1899) | | |
| CEP290-1093 | + | CUAUGAGCCAGCAAAAGCUU | 20 | upstream |
| | | (SEQ ID NO: 748) | | |
| CEP290-1094 | + | CAGAGUGCAUCCAUGGUCCAGG | 22 | upstream |
| | | (SEQ ID NO: 1901) | | |
| CEP290-1095 | + | CUGAAAUAUUAAGGGCUCUUC | 21 | upstream |
| | | (SEQ ID NO: 1902) | | |
| CEP290-1096 | + | CUCUAUACCUUUUACUGAGGA | 21 | upstream |
| | | (SEQ ID NO: 1903) | | |
| CEP290-1097 | − | CUAUACCUUUUACUGAGGA | 19 | upstream |
| | | (SEQ ID NO: 1904) | | |
| CEP290-1098 | − | CACUUGAACUCUAUACCUUUUACU | 24 | upstream |
| | | (SEQ ID NO: 1905) | | |
| CEP290-1099 | − | CUUGAACUCUAUACCUUUUACU | 22 | upstream |
| | | (SEQ ID NO: 1906) | | |
| CEP290-1100 | − | CCAACAGUAGCUGAAAUAUU | 20 | upstream |
| | | (SEQ ID NO: 1907) | | |
| CEP290-1101 | − | CAACAGUAGCUGAAAUAUU | 19 | upstream |
| | | (SEQ ID NO: 1908) | | |
| CEP290-1102 | + | CAUCCAUUCCAAGGAACAAAAGCC | 24 | upstream |
| | | (SEQ ID NO: 1909) | | |
| CEP290-1103 | + | CCAUUCCAAGGAACAAAAGCC | 21 | upstream |
| | | (SEQ ID NO: 1910) | | |
| CEP290-1104 | + | CAUUCCAAGGAACAAAAGCC | 20 | upstream |
| | | (SEQ ID NO: 1131) | | |
| CEP290-1105 | − | CCCUUUCUCUUACCCCUGUACC | 22 | upstream |
| | | (SEQ ID NO: 1912) | | |
| CEP290-1106 | − | CCUUUCUCUUACCCCUGUACC | 21 | upstream |
| | | (SEQ ID NO: 1913) | | |
| CEP290-1107 | − | CUUUCUCUUACCCCUGUACC | 20 | upstream |
| | | (SEQ ID NO: 1914) | | |
| CEP290-1108 | + | CUUUCUAAUGCUGGAGAGGA | 20 | upstream |
| | | (SEQ ID NO: 869) | | |
| CEP290-1109 | + | CUAAUGCUGGAGAGGAUAGGACA | 23 | upstream |
| | | (SEQ ID NO: 1916) | | |
| CEP290-1110 | − | CAUAAGUUACAAUCUGUGAAU | 21 | upstream |
| | | (SEQ ID NO: 1917) | | |
| CEP290-1111 | − | CCAGACAUCUAAGAGAAAA | 19 | upstream |
| | | (SEQ ID NO: 1918) | | |
| CEP290-1112 | − | CAGACAUCUAAGAGAAAA | 18 | upstream |
| | | (SEQ ID NO: 1919) | | |
| CEP290-1113 | + | CCUCUAUUUCUGAUGAGGAAG | 21 | upstream |
| | | (SEQ ID NO: 1920) | | |
| CEP290-1114 | + | CUCUAUUUCUGAUGAGGAAG | 20 | upstream |
| | | (SEQ ID NO: 866) | | |
| CEP290-1115 | + | CUAUUUCUGAUGAGGAAG | 18 | upstream |
| | | (SEQ ID NO: 1922) | | |
| CEP290-1116 | + | CUGAUGAGGAAGAUGAACAAAUC | 23 | upstream |
| | | (SEQ ID NO: 1923) | | |
| CEP290-1117 | + | CAUUUACUGAAUGUGUCUCU | 20 | upstream |
| | | (SEQ ID NO: 856) | | |
| CEP290-1118 | + | CAGGGGUAAGAGAAAGGG | 18 | upstream |
| | | (SEQ ID NO: 1925) | | |
| CEP290-1119 | + | GUUGGCUACAUCCAUUCCA | 19 | upstream |
| | | (SEQ ID NO: 1926) | | |
| CEP290-1120 | − | GUAGUUAUCUUACAGCCAC | 19 | upstream |
| | | (SEQ ID NO: 1927) | | |
| CEP290-1121 | + | GUCUCUAUGAGCCAGCAAAAGCUU | 24 | upstream |
| | | (SEQ ID NO: 1928) | | |
| CEP290-1122 | + | GAGUGCAUCCAUGGUCCAGG | 20 | upstream |
| | | (SEQ ID NO: 1929) | | |
| CEP290-1123 | + | GUGCAUCCAUGGUCCAGG | 18 | upstream |
| | | (SEQ ID NO: 1930) | | |
| CEP290-1124 | − | GCUGAAAUAUUAAGGGCUCUUC | 22 | upstream |
| | | (SEQ ID NO: 1931) | | |
| CEP290-1125 | − | GAAAUAUUAAGGGCUCUUC | 19 | upstream |
| | | (SEQ ID NO: 1932) | | |
| CEP290-1126 | − | GAACUCUAUACCUUUUACUGAGGA | 24 | upstream |
| | | (SEQ ID NO: 1933) | | |
| CEP290-1127 | − | GAACUCUAUACCUUUUACU | 19 | upstream |
| | | (SEQ ID NO: 1934) | | |
| CEP290-1128 | + | GUAGGAAUCCUGAAAGCUACU | 21 | upstream |
| | | (SEQ ID NO: 1935) | | |
| CEP290-1129 | + | GGAAUCCUGAAAGCUACU | 18 | upstream |
| | | (SEQ ID NO: 1936) | | |
| CEP290-1130 | − | GUAGCCAACAGUAGCUGAAAUAUU | 24 | upstream |
| | | (SEQ ID NO: 1937) | | |
| CEP290-1131 | − | GCCAACAGUAGCUGAAAUAUU | 21 | upstream |
| | | (SEQ ID NO: 1938) | | |
| CEP290-1132 | + | GGACUUUCUAAUGCUGGAGAGGA | 23 | upstream |
| | | (SEQ ID NO: 1939) | | |
| CEP290-1133 | + | GACUUUCUAAUGCUGGAGAGGA | 22 | upstream |
| | | (SEQ ID NO: 1940) | | |
| CEP290-1134 | + | GCUGGAGAGGAUAGGACA | 18 | upstream |
| | | (SEQ ID NO: 1941) | | |
| CEP290-1135 | + | GCCUCUAUUUCUGAUGAGGAAG | 22 | upstream |
| | | (SEQ ID NO: 1942) | | |
| CEP290-1136 | + | GAUGAGGAAGAUGAACAAAUC | 21 | upstream |
| | | (SEQ ID NO: 1943) | | |
| CEP290-1137 | + | GAGGAAGAUGAACAAAUC | 18 | upstream |
| | | (SEQ ID NO: 1944) | | |
| CEP290-1138 | + | GGGUACAGGGGUAAGAGAAAGGG | 23 | upstream |
| | | (SEQ ID NO: 1945) | | |
| CEP290-1139 | + | GGUACAGGGGUAAGAGAAAGGG | 22 | upstream |
| | | (SEQ ID NO: 1946) | | |
| CEP290-1140 | + | GUACAGGGGUAAGAGAAAGGG | 21 | upstream |
| | | (SEQ ID NO: 1947) | | |
| CEP290-1141 | + | GUGUGUGUGUGUGUGUGUUAUGU | 23 | upstream |
| | | (SEQ ID NO: 1948) | | |
| CEP290-1142 | + | GUGUGUGUGUGUGUGUUAUGU | 21 | upstream |
| | | (SEQ ID NO: 1949) | | |
| CEP290-1143 | + | GUGUGUGUGUGUGUUAUGU | 19 | upstream |
| | | (SEQ ID NO: 1950) | | |
| CEP290-1144 | + | UACUGUUGGCUACAUCCAUUCCA | 23 | upstream |
| | | (SEQ ID NO: 1951) | | |
| CEP290-1145 | + | UGUUGGCUACAUCCAUUCCA | 20 | upstream |
| | | (SEQ ID NO: 1952) | | |
| CEP290-1146 | + | UUGGCUACAUCCAUUCCA | 18 | upstream |
| | | (SEQ ID NO: 1953) | | |
| CEP290-1147 | + | UUAUCCACAAGAUGUCUCUUGCC | 23 | upstream |
| | | (SEQ ID NO: 1954) | | |
| CEP290-1148 | + | UAUCCACAAGAUGUCUCUUGCC | 22 | upstream |
| | | (SEQ ID NO: 1955) | | |
| CEP290-1149 | + | UCCACAAGAUGUCUCUUGCC | 20 | upstream |
| | | (SEQ ID NO: 885) | | |
| CEP290-1150 | − | UUUGUAGUUAUCUUACAGCCAC | 22 | upstream |
| | | (SEQ ID NO: 1957) | | |
| CEP290-1151 | − | UUGUAGUUAUCUUACAGCCAC | 21 | upstream |
| | | (SEQ ID NO: 1958) | | |
| CEP290-1152 | − | UGUAGUUAUCUUACAGCCAC | 20 | upstream |
| | | (SEQ ID NO: 1959) | | |
| CEP290-1153 | − | UAGUUAUCUUACAGCCAC | 18 | upstream |
| | | (SEQ ID NO: 1960) | | |
| CEP290-1154 | + | UCUCUAUGAGCCAGCAAAAGCUU | 23 | upstream |
| | | (SEQ ID NO: 1961) | | |
| CEP290-1155 | + | UCUAUGAGCCAGCAAAAGCUU | 21 | upstream |
| | | (SEQ ID NO: 1962) | | |
| CEP290-1156 | + | UAUGAGCCAGCAAAAGCUU | 19 | upstream |
| | | (SEQ ID NO: 1963) | | |
| CEP290-1157 | + | UACAGAGUGCAUCCAUGGUCCAGG | 24 | upstream |
| | | (SEQ ID NO: 1964) | | |
| CEP290-1158 | − | UAGCUGAAAUAUUAAGGGCUCUUC | 24 | upstream |
| | | (SEQ ID NO: 1965) | | |
| CEP290-1159 | − | UGAAAUAUUAAGGGCUCUUC | 20 | upstream |
| | | (SEQ ID NO: 1966) | | |
| CEP290-1160 | − | UCUAUACCUUUUACUGAGGA | 20 | upstream |
| | | (SEQ ID NO: 889) | | |
| CEP290-1161 | − | UAUACCUUUUACUGAGGA | 18 | upstream |
| | | (SEQ ID NO: 1968) | | |
| CEP290-1162 | − | UUGAACUCUAUACCUUUUACU | 21 | upstream |
| | | (SEQ ID NO: 1969) | | |
| CEP290-1163 | − | UGAACUCUAUACCUUUUACU | 20 | upstream |
| | | (SEQ ID NO: 1970) | | |
| CEP290-1164 | + | UUAGUAGGAAUCCUGAAAGCUACU | 24 | upstream |
| | | (SEQ ID NO: 1971) | | |
| CEP290-1165 | + | UAGUAGGAAUCCUGAAAGCUACU | 23 | upstream |
| | | (SEQ ID NO: 1972) | | |
| CEP290-1166 | + | UAGGAAUCCUGAAAGCUACU | 20 | upstream |
| | | (SEQ ID NO: 760) | | |
| CEP290-1167 | − | UAGCCAACAGUAGCUGAAAUAUU | 23 | upstream |
| | | (SEQ ID NO: 1974) | | |
| CEP290-1168 | + | UCCAUUCCAAGGAACAAAAGCC | 22 | upstream |
| | | (SEQ ID NO: 1975) | | |
| CEP290-1169 | + | UUCCAAGGAACAAAAGCC | 18 | upstream |
| | | (SEQ ID NO: 1976) | | |
| CEP290-1170 | − | UCCCUUUCUCUUACCCCUGUACC | 23 | upstream |
| | | (SEQ ID NO: 1977) | | |
| CEP290-1171 | − | UUUCUCUUACCCCUGUACC | 19 | upstream |
| | | (SEQ ID NO: 1978) | | |
| CEP290-1172 | − | UUCUCUUACCCCUGUACC | 18 | upstream |
| | | (SEQ ID NO: 1979) | | |
| CEP290-1173 | + | UUUCUAAUGCUGGAGAGGA | 19 | upstream |
| | | (SEQ ID NO: 1980) | | |
| CEP290-1174 | + | UUCUAAUGCUGGAGAGGA | 18 | upstream |
| | | (SEQ ID NO: 1981) | | |
| CEP290-1175 | + | UCUAAUGCUGGAGAGGAUAGGACA | 24 | upstream |
| | | (SEQ ID NO: 1982) | | |
| CEP290-1176 | + | UAAUGCUGGAGAGGAUAGGACA | 22 | upstream |
| | | (SEQ ID NO: 1983) | | |
| CEP290-1177 | + | UGCUGGAGAGGAUAGGACA | 19 | upstream |
| | | (SEQ ID NO: 1984) | | |
| CEP290-1178 | − | UAUCAUAAGUUACAAUCUGUGAAU | 24 | upstream |
| | | (SEQ ID NO: 1985) | | |
| CEP290-1179 | − | UCAUAAGUUACAAUCUGUGAAU | 22 | upstream |
| | | (SEQ ID NO: 1986) | | |
| CEP290-1180 | − | UAAGUUACAAUCUGUGAAU | 19 | upstream |
| | | (SEQ ID NO: 1987) | | |
| CEP290-1181 | − | UUUAACCAGACAUCUAAGAGAAAA | 24 | upstream |
| | | (SEQ ID NO: 1988) | | |
| CEP290-1182 | − | UUAACCAGACAUCUAAGAGAAAA | 23 | upstream |
| | | (SEQ ID NO: 1989) | | |
| CEP290-1183 | − | UAACCAGACAUCUAAGAGAAAA | 22 | upstream |
| | | (SEQ ID NO: 1990) | | |
| CEP290-1184 | + | UCUAUUUCUGAUGAGGAAG | 19 | upstream |
| | | (SEQ ID NO: 1991) | | |
| CEP290-1185 | + | UCUGAUGAGGAAGAUGAACAAAUC | 24 | upstream |
| | | (SEQ ID NO: 1992) | | |
| CEP290-1186 | + | UGAUGAGGAAGAUGAACAAAUC | 22 | upstream |
| | | (SEQ ID NO: 1993) | | |
| CEP290-1187 | + | UGAGGAAGAUGAACAAAUC | 19 | upstream |
| | | (SEQ ID NO: 1994) | | |
| CEP290-1188 | + | UUUUCAUUUACUGAAUGUGUCUCU | 24 | upstream |
| | | (SEQ ID NO: 1995) | | |
| CEP290-1189 | + | UUUCAUUUACUGAAUGUGUCUCU | 23 | upstream |
| | | (SEQ ID NO: 1996) | | |
| CEP290-1190 | + | UUCAUUUACUGAAUGUGUCUCU | 22 | upstream |
| | | (SEQ ID NO: 1997) | | |
| CEP290-1191 | + | UCAUUUACUGAAUGUGUCUCU | 21 | upstream |
| | | (SEQ ID NO: 1998) | | |
| CEP290-1192 | + | UUUACUGAAUGUGUCUCU | 18 | upstream |
| | | (SEQ ID NO: 1999) | | |
| CEP290-1193 | + | UGGGUACAGGGGUAAGAGAAAGGG | 24 | upstream |
| | | (SEQ ID NO: 2000) | | |
| CEP290-1194 | + | UACAGGGGUAAGAGAAAGGG | 20 | upstream |
| | | (SEQ ID NO: 2001) | | |
| CEP290-1195 | + | UGUGUGUGUGUGUGUGUGUUAUGU | 24 | upstream |
| | | (SEQ ID NO: 2002) | | |
| CEP290-1196 | + | UGUGUGUGUGUGUGUGUUAUGU | 22 | upstream |
| | | (SEQ ID NO: 2003) | | |
| CEP290-1197 | + | UGUGUGUGUGUGUGUUAUGU | 20 | upstream |
| | | (SEQ ID NO: 1185) | | |
| CEP290-1198 | + | UGUGUGUGUGUGUUAUGU | 18 | upstream |
| | | (SEQ ID NO: 2005) | | |
| CEP290-1199 | + | AUUUACAGAGUGCAUCCAUGGUCC | 24 | upstream |
| | | (SEQ ID NO: 2006) | | |
| CEP290-1200 | + | ACAGAGUGCAUCCAUGGUCC | 20 | upstream |
| | | (SEQ ID NO: 1085) | | |
| CEP290-1201 | + | AGAGUGCAUCCAUGGUCC | 18 | upstream |
| | | (SEQ ID NO: 2008) | | |
| CEP290-1202 | − | ACUUGAACUCUAUACCUUUUA | 21 | upstream |
| | | (SEQ ID NO: 2009) | | |
| CEP290-1203 | + | AGCUAAAUCAUGCAAGUGACCU | 22 | upstream |
| | | (SEQ ID NO: 2010) | | |
| CEP290-1204 | + | AAAUCAUGCAAGUGACCU | 18 | upstream |
| | | (SEQ ID NO: 2011) | | |
| CEP290-1205 | + | AUCCAUAAGCCUCUAUUUCUGAUG | 24 | upstream |
| | | (SEQ ID NO: 2012) | | |
| CEP290-1206 | + | AUAAGCCUCUAUUUCUGAUG | 20 | upstream |
| | | (SEQ ID NO: 723) | | |
| CEP290-1207 | + | AAGCCUCUAUUUCUGAUG | 18 | upstream |
| | | (SEQ ID NO: 2014) | | |
| CEP290-1208 | + | AGAAUAGUUUGUUCUGGGUA | 20 | upstream |
| | | (SEQ ID NO: 2015) | | |
| CEP290-1209 | + | AAUAGUUUGUUCUGGGUA | 18 | upstream |
| | | (SEQ ID NO: 2016) | | |
| CEP290-1210 | + | AGGAGAAUGAUCUAGAUAAUCAUU | 24 | upstream |
| | | (SEQ ID NO: 2017) | | |
| CEP290-1211 | + | AGAAUGAUCUAGAUAAUCAUU | 21 | upstream |
| | | (SEQ ID NO: 2018) | | |
| CEP290-1212 | + | AAUGAUCUAGAUAAUCAUU | 19 | upstream |
| | | (SEQ ID NO: 2019) | | |
| CEP290-1213 | + | AUGAUCUAGAUAAUCAUU | 18 | upstream |
| | | (SEQ ID NO: 2020) | | |
| CEP290-1214 | + | AAUGCUGGAGAGGAUAGGA | 19 | upstream |
| | | (SEQ ID NO: 2021) | | |
| CEP290-1215 | + | AUGCUGGAGAGGAUAGGA | 18 | upstream |
| | | (SEQ ID NO: 2022) | | |
| CEP290-1216 | + | AAAAUCCAUAAGCCUCUAUUUCUG | 24 | upstream |
| | | (SEQ ID NO: 2023) | | |
| CEP290-1217 | + | AAAUCCAUAAGCCUCUAUUUCUG | 23 | upstream |
| | | (SEQ ID NO: 20241 | | |
| CEP290-1218 | + | AAUCCAUAAGCCUCUAUUUCUG | 22 | upstream |
| | | (SEQ ID NO: 2025) | | |
| CEP290-1219 | + | AUCCAUAAGCCUCUAUUUCUG | 21 | upstream |
| | | (SEQ ID NO: 2026) | | |
| CEP290-1220 | − | AAACAGGUAGAAUAUUGUAAUCA | 23 | upstream |
| | | (SEQ ID NO: 2027) | | |
| CEP290-1221 | − | AACAGGUAGAAUAUUGUAAUCA | 22 | upstream |
| | | (SEQ ID NO: 2028) | | |
| CEP290-1222 | − | ACAGGUAGAAUAUUGUAAUCA | 21 | upstream |
| | | (SEQ ID NO: 2029) | | |
| CEP290-1223 | − | AGGUAGAAUAUUGUAAUCA | 19 | upstream |
| | | (SEQ ID NO: 2030) | | |
| CEP290-1224 | + | AAGGAACAAAAGCCAGGGACCA | 22 | upstream |
| | | (SEQ ID NO: 2031) | | |
| CEP290-1225 | + | AGGAACAAAAGCCAGGGACCA | 21 | upstream |
| | | (SEQ ID NO: 2032) | | |
| CEP290-1226 | + | AACAAAAGCCAGGGACCA | 18 | upstream |
| | | (SEQ ID NO: 2033) | | |
| CEP290-1227 | − | AGGUAGAAUAUUGUAAUCAAAGGA | 24 | upstream |
| | | (SEQ ID NO: 2034) | | |
| CEP290-1228 | − | AGAAUAUUGUAAUCAAAGGA | 20 | upstream |
| | | (SEQ ID NO: 1089) | | |
| CEP290-1229 | − | AAUAUUGUAAUCAAAGGA | 18 | upstream |
| | | (SEQ ID NO: 2036) | | |
| CEP290-1230 | − | AGUCAUGUUUAUCAAUAUUAUU | 22 | upstream |
| | | (SEQ ID NO: 2037) | | |
| CEP290-1231 | − | AUGUUUAUCAAUAUUAUU | 18 | upstream |
| | | (SEQ ID NO: 2038) | | |
| CEP290-1232 | − | AACCAGACAUCUAAGAGAAA | 20 | upstream |
| | | (SEQ ID NO: 2039) | | |
| CEP290-1233 | − | ACCAGACAUCUAAGAGAAA | 19 | upstream |
| | | (SEQ ID NO: 2040) | | |
| CEP290-1234 | − | AUUCUUAUCUAAGAUCCUUUCA | 22 | upstream |
| | | (SEQ ID NO: 2041) | | |
| CEP290-1235 | − | AAACAGGUAGAAUAUUGUAAUCAA | 24 | upstream |
| | | (SEQ ID NO: 2042) | | |
| CEP290-1236 | − | AACAGGUAGAAUAUUGUAAUCAA | 23 | upstream |
| | | (SEQ ID NO: 2043) | | |
| CEP290-1237 | − | ACAGGUAGAAUAUUGUAAUCAA | 22 | upstream |
| | | (SEQ ID NO: 2044) | | |
| CEP290-1238 | − | AGGUAGAAUAUUGUAAUCAA | 20 | upstream |
| | | (SEQ ID NO: 1101) | | |
| CEP290-1239 | + | AUGAGGAAGAUGAACAAAU | 19 | upstream |
| | | (SEQ ID NO: 2046) | | |
| CEP290-1240 | + | AGAGGAUAGGACAGAGGAC | 19 | upstream |
| | | (SEQ ID NO: 2047) | | |
| CEP290-1241 | + | CAGAGUGCAUCCAUGGUCC | 19 | upstream |
| | | (SEQ ID NO: 2048) | | |
| CEP290-1242 | + | CUUGCCUAGGACUUUCUAAUGCUG | 24 | upstream |
| | | (SEQ ID NO: 2049) | | |
| CEP290-1243 | + | CCUAGGACUUUCUAAUGCUG | 20 | upstream |
| | | (SEQ ID NO: 858) | | |
| CEP290-1244 | + | CUAGGACUUUCUAAUGCUG | 19 | upstream |
| | | (SEQ ID NO: 2051) | | |
| CEP290-1245 | − | CCACUUGAACUCUAUACCUUUUA | 23 | upstream |
| | | (SEQ ID NO: 2052) | | |
| CEP290-1246 | − | CACUUGAACUCUAUACCUUUUA | 22 | upstream |
| | | (SEQ ID NO: 2053) | | |
| CEP290-1247 | − | CUUGAACUCUAUACCUUUUA | 20 | upstream |
| | | (SEQ ID NO: 2054) | | |
| CEP290-1248 | + | CAGCUAAAUCAUGCAAGUGACCU | 23 | upstream |
| | | (SEQ ID NO: 2055) | | |
| CEP290-1249 | + | CUAAAUCAUGCAAGUGACCU | 20 | upstream |
| | | (SEQ ID NO: 2056) | | |
| CEP290-1250 | + | CUCUUGCCUAGGACUUUCUAAUG | 23 | upstream |
| | | (SEQ ID NO: 2057) | | |
| CEP290-1251 | + | CUUGCCUAGGACUUUCUAAUG | 21 | upstream |
| | | (SEQ ID NO: 2058) | | |
| CEP290-1252 | + | CCAUAAGCCUCUAUUUCUGAUG | 22 | upstream |
| | | (SEQ ID NO: 2059) | | |
| CEP290-1253 | + | CAUAAGCCUCUAUUUCUGAUG | 21 | upstream |
| | | (SEQ ID NO: 2060) | | |
| CEP290-1254 | + | CUAAUGCUGGAGAGGAUAGGA | 21 | upstream |
| | | (SEQ ID NO: 2061) | | |
| CEP290-1255 | + | CCAUAAGCCUCUAUUUCUG | 19 | upstream |
| | | (SEQ ID NO: 2062) | | |
| CEP290-1256 | + | CAUAAGCCUCUAUUUCUG | 18 | upstream |
| | | (SEQ ID NO: 2063) | | |
| CEP290-1257 | − | CAGGUAGAAUAUUGUAAUCA | 20 | upstream |
| | | (SEQ ID NO: 2064) | | |
| CEP290-1258 | − | CUUUCUGCUGCUUUUGCCAAA | 21 | upstream |
| | | (SEQ ID NO: 2065) | | |
| CEP290-1259 | + | CCAAGGAACAAAAGCCAGGGACCA | 24 | upstream |
| | | (SEQ ID NO: 2066) | | |
| CEP290-1260 | + | CAAGGAACAAAAGCCAGGGACCA | 23 | upstream |
| | | (SEQ ID NO: 2067) | | |
| CEP290-1261 | + | CUCUUAGAUGUCUGGUUAA | 19 | upstream |
| | | (SEQ ID NO: 2068) | | |
| CEP290-1262 | − | CAUGUUUAUCAAUAUUAUU | 19 | upstream |
| | | (SEQ ID NO: 2069) | | |
| CEP290-1263 | − | CCAGACAUCUAAGAGAAA | 18 | upstream |
| | | (SEQ ID NO: 2070) | | |
| CEP290-1264 | − | CUUAUCUAAGAUCCUUUCA | 19 | upstream |
| | | (SEQ ID NO: 2071) | | |
| CEP290-1265 | − | CAGGUAGAAUAUUGUAAUCAA | 21 | upstream |
| | | (SEQ ID NO: 2072) | | |
| CEP290-1266 | + | CUGAUGAGGAAGAUGAACAAAU | 22 | upstream |
| | | (SEQ ID NO: 2073) | | |
| CEP290-1267 | + | CUGGAGAGGAUAGGACAGAGGAC | 23 | upstream |
| | | (SEQ ID NO: 2074) | | |
| CEP290-1268 | − | CAUCUUCCUCAUCAGAAA | 18 | upstream |
| | | (SEQ ID NO: 2075) | | |
| CEP290-1269 | + | GCCUAGGACUUUCUAAUGCUG | 21 | upstream |
| | | (SEQ ID NO: 2076) | | |
| CEP290-1270 | − | GCCACUUGAACUCUAUACCUUUUA | 24 | upstream |
| | | (SEQ ID NO: 2077) | | |
| CEP290-1271 | + | GCUAAAUCAUGCAAGUGACCU | 21 | upstream |
| | | (SEQ ID NO: 2078) | | |
| CEP290-1272 | + | GCCUAGGACUUUCUAAUG | 18 | upstream |
| | | (SEQ ID NO: 2079) | | |
| CEP290-1273 | + | GGGAGAAUAGUUUGUUCUGGGUA | 23 | upstream |
| | | (SEQ ID NO: 2080) | | |
| CEP290-1274 | + | GGAGAAUAGUUUGUUCUGGGUA | 22 | upstream |
| | | (SEQ ID NO: 2081) | | |
| CEP290-1275 | + | GAGAAUAGUUUGUUCUGGGUA | 21 | upstream |
| | | (SEQ ID NO: 2082) | | |
| CEP290-1276 | + | GAAUAGUUUGUUCUGGGUA | 19 | upstream |
| | | (SEQ ID NO: 2083) | | |
| CEP290-1277 | + | GGAGAAUGAUCUAGAUAAUCAUU | 23 | upstream |
| | | (SEQ ID NO: 2084) | | |
| CEP290-1278 | + | GAGAAUGAUCUAGAUAAUCAUU | 22 | upstream |
| | | (SEQ ID NO: 2085) | | |
| CEP290-1279 | + | GAAUGAUCUAGAUAAUCAUU | 20 | upstream |
| | | (SEQ ID NO: 2086) | | |
| CEP290-1280 | − | GAAACAGGUAGAAUAUUGUAAUCA | 24 | upstream |
| | | (SEQ ID NO: 2087) | | |
| CEP290-1281 | − | GGUAGAAUAUUGUAAUCA | 18 | upstream |
| | | (SEQ ID NO: 2088) | | |
| CEP290-1282 | − | GCUUUCUGCUGCUUUUGCCAAA | 22 | upstream |
| | | (SEQ ID NO: 2089) | | |
| CEP290-1283 | + | GGAACAAAAGCCAGGGACCA | 20 | upstream |
| | | (SEQ ID NO: 484) | | |
| CEP290-1284 | + | GAACAAAAGCCAGGGACCA | 19 | upstream |
| | | (SEQ ID NO: 2090) | | |
| CEP290-1285 | − | GGUAGAAUAUUGUAAUCAAAGGA | 23 | upstream |
| | | (SEQ ID NO: 2091) | | |
| CEP290-1286 | − | GUAGAAUAUUGUAAUCAAAGGA | 22 | upstream |
| | | (SEQ ID NO: 2092) | | |
| CEP290-1287 | − | GAAUAUUGUAAUCAAAGGA | 19 | upstream |
| | | (SEQ ID NO: 2093) | | |
| CEP290-1288 | − | GAGUCAUGUUUAUCAAUAUUAUU | 23 | upstream |
| | | (SEQ ID NO: 2094) | | |
| CEP290-1289 | − | GUCAUGUUUAUCAAUAUUAUU | 21 | upstream |
| | | (SEQ ID NO: 2095) | | |
| CEP290-1290 | − | GGUAGAAUAUUGUAAUCAA | 19 | upstream |
| | | (SEQ ID NO: 2096) | | |
| CEP290-1291 | − | GUAGAAUAUUGUAAUCAA | 18 | upstream |
| | | (SEQ ID NO: 2097) | | |
| CEP290-1292 | + | GAUGAGGAAGAUGAACAAAU | 20 | upstream |
| | | (SEQ ID NO: 773) | | |
| CEP290-1293 | + | GCUGGAGAGGAUAGGACAGAGGAC | 24 | upstream |
| | | (SEQ ID NO: 2099) | | |
| CEP290-1294 | + | GGAGAGGAUAGGACAGAGGAC | 21 | upstream |
| | | (SEQ ID NO: 2100) | | |
| CEP290-1295 | + | GAGAGGAUAGGACAGAGGAC | 20 | upstream |
| | | (SEQ ID NO: 772) | | |
| CEP290-1296 | + | GAGGAUAGGACAGAGGAC | 18 | upstream |
| | | (SEQ ID NO: 2102) | | |
| CEP290-1297 | − | GUUCAUCUUCCUCAUCAGAAA | 21 | upstream |
| | | (SEQ ID NO: 2103) | | |
| CEP290-1298 | + | UUUACAGAGUGCAUCCAUGGUCC | 23 | upstream |
| | | (SEQ ID NO: 2104) | | |
| CEP290-1299 | + | UUACAGAGUGCAUCCAUGGUCC | 22 | upstream |
| | | (SEQ ID NO: 2105) | | |
| CEP290-1300 | + | UACAGAGUGCAUCCAUGGUCC | 21 | upstream |
| | | (SEQ ID NO: 2106) | | |
| CEP290-1301 | + | UUGCCUAGGACUUUCUAAUGCUG | 23 | upstream |
| | | (SEQ ID NO: 2107) | | |
| CEP290-1302 | + | UGCCUAGGACUUUCUAAUGCUG | 22 | upstream |
| | | (SEQ ID NO: 2108) | | |
| CEP290-1303 | + | UAGGACUUUCUAAUGCUG | 18 | upstream |
| | | (SEQ ID NO: 2109) | | |
| CEP290-1304 | − | UUGAACUCUAUACCUUUUA | 19 | upstream |
| | | (SEQ ID NO: 2110) | | |
| CEP290-1305 | − | UGAACUCUAUACCUUUUA | 18 | upstream |
| | | (SEQ ID NO: 2111) | | |
| CEP290-1306 | + | UCAGCUAAAUCAUGCAAGUGACCU | 24 | upstream |
| | | (SEQ ID NO: 2112) | | |
| CEP290-1307 | + | UAAAUCAUGCAAGUGACCU | 19 | upstream |
| | | (SEQ ID NO: 2113) | | |
| CEP290-1308 | + | UCUCUUGCCUAGGACUUUCUAAUG | 24 | upstream |
| | | (SEQ ID NO: 2114) | | |
| CEP290-1309 | + | UCUUGCCUAGGACUUUCUAAUG | 22 | upstream |
| | | (SEQ ID NO: 2115) | | |
| CEP290-1310 | + | UUGCCUAGGACUUUCUAAUG | 20 | upstream |
| | | (SEQ ID NO: 906) | | |
| CEP290-1311 | + | UGCCUAGGACUUUCUAAUG | 19 | upstream |
| | | (SEQ ID NO: 2117) | | |
| CEP290-1312 | + | UCCAUAAGCCUCUAUUUCUGAUG | 23 | upstream |
| | | (SEQ ID NO: 2118) | | |
| CEP290-1313 | + | UAAGCCUCUAUUUCUGAUG | 19 | upstream |
| | | (SEQ ID NO: 2119) | | |
| CEP290-1314 | + | UGGGAGAAUAGUUUGUUCUGGGUA | 24 | upstream |
| | | (SEQ ID NO: 2120) | | |
| CEP290-1315 | + | UUUCUAAUGCUGGAGAGGAUAGGA | 24 | upstream |
| | | (SEQ ID NO: 2121) | | |
| CEP290-1316 | + | UUCUAAUGCUGGAGAGGAUAGGA | 23 | upstream |
| | | (SEQ ID NO: 2122) | | |
| CEP290-1317 | + | UCUAAUGCUGGAGAGGAUAGGA | 22 | upstream |
| | | (SEQ ID NO: 2123) | | |
| CEP290-1318 | + | UAAUGCUGGAGAGGAUAGGA | 20 | upstream |
| | | (SEQ ID NO: 873) | | |
| CEP290-1319 | + | UCCAUAAGCCUCUAUUUCUG | 20 | upstream |
| | | (SEQ ID NO: 886) | | |
| CEP290-1320 | − | UUGCUUUCUGCUGCUUUUGCCAAA | 24 | upstream |
| | | (SEQ ID NO: 2126) | | |
| CEP290-1321 | − | UGCUUUCUGCUGCUUUUGCCAAA | 23 | upstream |
| | | (SEQ ID NO: 2127) | | |
| CEP290-1322 | − | UUUCUGCUGCUUUUGCCAAA | 20 | upstream |
| | | (SEQ ID NO: 907) | | |
| CEP290-1323 | − | UUCUGCUGCUUUUGCCAAA | 19 | upstream |
| | | (SEQ ID NO: 2129) | | |
| CEP290-1324 | − | UCUGCUGCUUUUGCCAAA | 18 | upstream |
| | | (SEQ ID NO: 2130) | | |
| CEP290-1325 | − | UAGAAUAUUGUAAUCAAAGGA | 21 | upstream |
| | | (SEQ ID NO: 2131) | | |
| CEP290-1326 | + | UUUUUCUCUUAGAUGUCUGGUUAA | 24 | upstream |
| | | (SEQ ID NO: 2132) | | |
| CEP290-1327 | + | UUUUCUCUUAGAUGUCUGGUUAA | 23 | upstream |
| | | (SEQ ID NO: 2133) | | |
| CEP290-1328 | + | UUUCUCUUAGAUGUCUGGUUAA | 22 | upstream |
| | | (SEQ ID NO: 2134) | | |
| CEP290-1329 | + | UUCUCUUAGAUGUCUGGUUAA | 21 | upstream |
| | | (SEQ ID NO: 2135) | | |
| CEP290-1330 | + | UCUCUUAGAUGUCUGGUUAA | 20 | upstream |
| | | (SEQ ID NO: 2136) | | |
| CEP290-1331 | + | UCUUAGAUGUCUGGUUAA | 18 | upstream |
| | | (SEQ ID NO: 2137) | | |
| CEP290-1332 | − | UGAGUCAUGUUUAUCAAUAUUAUU | 24 | upstream |
| | | (SEQ ID NO: 2138) | | |
| CEP290-1333 | − | UCAUGUUUAUCAAUAUUAUU | 20 | upstream |
| | | (SEQ ID NO: 884) | | |
| CEP290-1334 | − | UUUUAACCAGACAUCUAAGAGAAA | 24 | upstream |
| | | (SEQ ID NO: 2140) | | |
| CEP290-1335 | − | UUUAACCAGACAUCUAAGAGAAA | 23 | upstream |
| | | (SEQ ID NO: 2141) | | |
| CEP290-1336 | − | UUAACCAGACAUCUAAGAGAAA | 22 | upstream |
| | | (SEQ ID NO: 2142) | | |
| CEP290-1337 | − | UAACCAGACAUCUAAGAGAAA | 21 | upstream |
| | | (SEQ ID NO: 2143) | | |
| CEP290-1338 | − | UUAUUCUUAUCUAAGAUCCUUUCA | 24 | upstream |
| | | (SEQ ID NO: 2144) | | |
| CEP290-1339 | − | UAUUCUUAUCUAAGAUCCUUUCA | 23 | upstream |
| | | (SEQ ID NO: 2145) | | |
| CEP290-1340 | − | UUCUUAUCUAAGAUCCUUUCA | 21 | upstream |
| | | (SEQ ID NO: 2146) | | |
| CEP290-1341 | − | UCUUAUCUAAGAUCCUUUCA | 20 | upstream |
| | | (SEQ ID NO: 892) | | |
| CEP290-1342 | − | UUAUCUAAGAUCCUUUCA | 18 | upstream |
| | | (SEQ ID NO: 2148) | | |
| CEP290-1343 | + | UUCUGAUGAGGAAGAUGAACAAAU | 24 | upstream |
| | | (SEQ ID NO: 2149) | | |
| CEP290-1344 | + | UCUGAUGAGGAAGAUGAACAAAU | 23 | upstream |
| | | (SEQ ID NO: 2150) | | |
| CEP290-1345 | + | UGAUGAGGAAGAUGAACAAAU | 21 | upstream |
| | | (SEQ ID NO: 2151) | | |
| CEP290-1346 | + | UGAGGAAGAUGAACAAAU | 18 | upstream |
| | | (SEQ ID NO: 2152) | | |
| CEP290-1347 | + | UGGAGAGGAUAGGACAGAGGAC | 22 | upstream |
| | | (SEQ ID NO: 2153) | | |
| CEP290-1348 | − | UUUGUUCAUCUUCCUCAUCAGAAA | 24 | upstream |
| | | (SEQ ID NO: 2154) | | |
| CEP290-1349 | − | UUGUUCAUCUUCCUCAUCAGAAA | 23 | upstream |
| | | (SEQ ID NO: 2155) | | |
| CEP290-1350 | − | UGUUCAUCUUCCUCAUCAGAAA | 22 | upstream |
| | | (SEQ ID NO: 2156) | | |
| CEP290-1351 | − | UUCAUCUUCCUCAUCAGAAA | 20 | upstream |
| | | (SEQ ID NO: 905) | | |
| CEP290-1352 | − | UCAUCUUCCUCAUCAGAAA | 19 | upstream |
| | | (SEQ ID NO: 2158) | | |
| CEP290-1353 | − | ACUUACCUCAUGUCAUCUAGAGC | 23 | downstream |
| | | (SEQ ID NO: 2159) | | |
| CEP290-1354 | − | ACCUCAUGUCAUCUAGAGC | 19 | downstream |
| | | (SEQ ID NO: 2160) | | |
| CEP290-1355 | + | ACAGUUUUUAAGGCGGGGAGUCAC | 24 | downstream |
| | | (SEQ ID NO: 2161) | | |
| CEP290-1356 | + | AGUUUUUAAGGCGGGGAGUCAC | 22 | downstream |
| | | (SEQ ID NO: 2162) | | |
| CEP290-1357 | − | ACAGAGUUCAAGCUAAUAC | 19 | downstream |
| | | (SEQ ID NO: 2163) | | |
| CEP290-1358 | + | AUUAGCUUGAACUCUGUGCCAAAC | 24 | downstream |
| | | (SEQ ID NO: 2164) | | |
| CEP290-1359 | + | AGCUUGAACUCUGUGCCAAAC | 21 | downstream |
| | | (SEQ ID NO: 2165) | | |
| CEP290-1360 | − | AUGUGGUGUCAAAUAUGGUGCU | 22 | downstream |
| | | (SEQ ID NO: 2166) | | |
| CEP290-1361 | − | AUGUGGUGUCAAAUAUGGUGCUU | 23 | downstream |
| | | (SEQ ID NO: 2167) | | |
| CEP290-1362 | + | AGAUGACAUGAGGUAAGU | 18 | downstream |
| | | (SEQ ID NO: 2168) | | |
| CEP290-1363 | − | AAUACAUGAGAGUGAUUAGUGG | 22 | downstream |
| | | (SEQ ID NO: 2169) | | |
| CEP290-1364 | − | AUACAUGAGAGUGAUUAGUGG | 21 | downstream |
| | | (SEQ ID NO: 2170) | | |
| CEP290-1365 | − | ACAUGAGAGUGAUUAGUGG | 19 | downstream |
| | | (SEQ ID NO: 2171) | | |
| CEP290-16 | + | AAGACACUGCCAAUAGGGAUAGGU | 24 | downstream |
| | | (SEQ ID NO: 1042) | | |
| CEP290-1366 | + | AGACACUGCCAAUAGGGAUAGGU | 23 | downstream |
| | | (SEQ ID NO: 1043) | | |
| CEP290-1367 | + | ACACUGCCAAUAGGGAUAGGU | 21 | downstream |
| | | (SEQ ID NO: 1044) | | |
| CEP290-510 | + | ACUGCCAAUAGGGAUAGGU | 19 | downstream |
| | | (SEQ ID NO: 1045) | | |
| CEP290-1368 | − | AAAGGUUCAUGAGACUAGAGGUC | 23 | downstream |
| | | (SEQ ID NO: 2176) | | |
| CEP290-1369 | − | AAGGUUCAUGAGACUAGAGGUC | 22 | downstream |
| | | (SEQ ID NO: 2177) | | |
| CEP290-1370 | − | AGGUUCAUGAGACUAGAGGUC | 21 | downstream |
| | | (SEQ ID NO: 2178) | | |
| CEP290-1371 | + | AAACAGGAGAUACUCAACACA | 21 | downstream |
| | | (SEQ ID NO: 2179) | | |
| CEP290-1372 | + | AACAGGAGAUACUCAACACA | 20 | downstream |
| | | (SEQ ID NO: 810) | | |
| CEP290-1373 | + | ACAGGAGAUACUCAACACA | 19 | downstream |
| | | (SEQ ID NO: 2181) | | |
| CEP290-1374 | + | AGCACGUACAAAAGAACAUACAU | 23 | downstream |
| | | (SEQ ID NO: 2182) | | |
| CEP290-1375 | + | ACGUACAAAAGAACAUACAU | 20 | downstream |
| | | (SEQ ID NO: 817) | | |
| CEP290-1376 | + | AGUAAGGAGGAUGUAAGAC | 19 | downstream |
| | | (SEQ ID NO: 2184) | | |
| CEP290-1377 | + | AGCUUUUGACAGUUUUUAAGG | 21 | downstream |
| | | (SEQ ID NO: 2185) | | |
| CEP290-1378 | − | ACGUGCUCUUUUCUAUAUAU | 20 | downstream |
| | | (SEQ ID NO: 622) | | |
| CEP290-1379 | + | AAAUUCACUGAGCAAAACAACUGG | 24 | downstream |
| | | (SEQ ID NO: 2186) | | |
| CEP290-1380 | + | AAUUCACUGAGCAAAACAACUGG | 23 | downstream |
| | | (SEQ ID NO: 2187) | | |
| CEP290-1381 | + | AUUCACUGAGCAAAACAACUGG | 22 | downstream |
| | | (SEQ ID NO: 2188) | | |
| CEP290-1382 | + | ACUGAGCAAAACAACUGG | 18 | downstream |
| | | (SEQ ID NO: 2189) | | |
| CEP290-1383 | + | AACAAGUUUUGAAACAGGAA | 20 | downstream |
| | | (SEQ ID NO: 809) | | |
| CEP290-1384 | + | ACAAGUUUUGAAACAGGAA | 19 | downstream |
| | | (SEQ ID NO: 2191) | | |
| CEP290-1385 | + | AAUGCCUGAACAAGUUUUGAAA | 22 | downstream |
| | | (SEQ ID NO: 2192) | | |
| CEP290-1386 | + | AUGCCUGAACAAGUUUUGAAA | 21 | downstream |
| | | (SEQ ID NO: 2193) | | |
| CEP290-1387 | + | AUUCACUGAGCAAAACAACUGGAA | 24 | downstream |
| | | (SEQ ID NO: 2194) | | |
| CEP290-1388 | + | ACUGAGCAAAACAACUGGAA | 20 | downstream |
| | | (SEQ ID NO: 819) | | |
| CEP290-1389 | + | AAAAAGGUAAUGCCUGAACAAGUU | 24 | downstream |
| | | (SEQ ID NO: 2196) | | |
| CEP290-1390 | + | AAAAGGUAAUGCCUGAACAAGUU | 23 | downstream |
| | | (SEQ ID NO: 2197) | | |
| CEP290-1391 | + | AAAGGUAAUGCCUGAACAAGUU | 22 | downstream |
| | | (SEQ ID NO: 2198) | | |
| CEP290-1392 | + | AAGGUAAUGCCUGAACAAGUU | 21 | downstream |
| | | (SEQ ID NO: 2199) | | |
| CEP290-1393 | + | AGGUAAUGCCUGAACAAGUU | 20 | downstream |
| | | (SEQ ID NO: 828) | | |
| CEP290-1394 | − | ACGUGCUCUUULCUAUAUA | 19 | downstream |
| | | (SEQ ID NO: 2201) | | |
| CEP290-1395 | + | AUUAUCUAUUCCAUUCUUCACAC | 23 | downstream |
| | | (SEQ ID NO: 2202) | | |
| CEP290-1396 | + | AUCUAUUCCAUUCUUCACAC | 20 | downstream |
| | | (SEQ ID NO: 2203) | | |
| CEP290-1397 | + | AAGAGAGAAAUGGUUCCCUAUAUA | 24 | downstream |
| | | (SEQ ID NO: 2204) | | |
| CEP290-1398 | + | AGAGAGAAAUGGUUCCCUAUAUA | 23 | downstream |
| | | (SEQ ID NO: 2205) | | |
| CEP290-1399 | + | AGAGAAAUGGUUCCCUAUAUA | 21 | downstream |
| | | (SEQ ID NO: 2206) | | |
| CEP290-1400 | + | AGAAAUGGUUCCCUAUAUA | 19 | downstream |
| | | (SEQ ID NO: 2207) | | |
| CEP290-1401 | − | AGGAAAUUAUUGUUGCUUU | 19 | downstream |
| | | (SEQ ID NO: 2208) | | |
| CEP290-1402 | + | ACUGAGCAAAACAACUGGAAGA | 22 | downstream |
| | | (SEQ ID NO: 2209) | | |
| CEP290-1403 | + | AGCAAAACAACUGGAAGA | 18 | downstream |
| | | (SEQ ID NO: 2210) | | |
| CEP290-1404 | + | AUACAUAAGAAAGAACACUGUGGU | 24 | downstream |
| | | (SEQ ID NO: 2211) | | |
| CEP290-1405 | + | ACAUAAGAAAGAACACUGUGGU | 22 | downstream |
| | | (SEQ ID NO: 2212) | | |
| CEP290-1406 | + | AUAAGAAAGAACACUGUGGU | 20 | downstream |
| | | (SEQ ID NO: 829) | | |
| CEP290-1407 | + | AAGAAAGAACACUGUGGU | 18 | downstream |
| | | (SEQ ID NO: 2214) | | |
| CEP290-1408 | − | AAGAAUGGAAUAGAUAAU | 18 | downstream |
| | | (SEQ ID NO: 2215) | | |
| CEP290-1409 | + | AAGGAGGAUGUAAGACUGGAGA | 22 | downstream |
| | | (SEQ ID NO: 2216) | | |
| CEP290-1410 | + | AGGAGGAUGUAAGACUGGAGA | 21 | downstream |
| | | (SEQ ID NO: 2217) | | |
| CEP290-1411 | + | AGGAUGUAAGACUGGAGA | 18 | downstream |
| | | (SEQ ID NO: 2218) | | |
| CEP290-1412 | − | AAAAACUUGAAAUUUGAUAGUAG | 23 | downstream |
| | | (SEQ ID NO: 2219) | | |
| CEP290-1413 | − | AAAACUUGAAAUUUGAUAGUAG | 22 | downstream |
| | | (SEQ ID NO: 2220) | | |
| CEP290-1414 | − | AAACUUGAAAUUUGAUAGUAG | 21 | downstream |
| | | (SEQ ID NO: 2221) | | |
| CEP290-1415 | − | AACUUGAAAUUUGAUAGUAG | 20 | downstream |
| | | (SEQ ID NO: 2222) | | |
| CEP290-1416 | − | ACUUGAAAUUUGAUAGUAG | 19 | downstream |
| | | (SEQ ID NO: 2223) | | |
| CEP290-1417 | − | ACAUAUCUGUCUUCCUUA | 18 | downstream |
| | | (SEQ ID NO: 2224) | | |
| CEP290-1418 | + | AUUAAAAAAAGUAUGCUU | 18 | downstream |
| | | (SEQ ID NO: 2225) | | |
| CEP290-1419 | + | AUAUCAAAAGACUUAUAUUCCAUU | 24 | downstream |
| | | (SEQ ID NO: 2226) | | |
| CEP290-1420 | + | AUCAAAAGACUUAUAUUCCAUU | 22 | downstream |
| | | (SEQ ID NO: 2227) | | |
| CEP290-1421 | + | AAAAGACUUAUAUUCCAUU | 19 | downstream |
| | | (SEQ ID NO: 2228) | | |
| CEP290-1422 | + | AAAGACUUAUAUUCCAUU | 18 | downstream |
| | | (SEQ ID NO: 2229) | | |
| CEP290-1423 | − | AAAAUCAGAUUUCAUGUGUGAAGA | 24 | downstream |
| | | (SEQ ID NO: 2230) | | |
| CEP290-1424 | − | AAAUCAGAUUUCAUGUGUGAAGA | 23 | downstream |
| | | (SEQ ID NO: 2231) | | |
| CEP290-1425 | − | AAUCAGAUUUCAUGUGUGAAGA | 22 | downstream |
| | | (SEQ ID NO: 2232) | | |
| CEP290-1426 | − | AUCAGAUUUCAUGUGUGAAGA | 21 | downstream |
| | | (SEQ ID NO: 2233) | | |
| CEP290-1427 | − | AGAUUUCAUGUGUGAAGA | 18 | downstream |
| | | (SEQ ID NO: 2234) | | |
| CEP290-1428 | − | AAUGGAAUAUAAGUCUUUUGAUAU | 24 | downstream |
| | | (SEQ ID NO: 2235) | | |
| CEP290-1429 | − | AUGGAAUAUAAGUCUUUUGAUAU | 23 | downstream |
| | | (SEQ ID NO: 2236) | | |
| CEP290-1430 | − | AAUAUAAGUCUUUUGAUAU | 19 | downstream |
| | | (SEQ ID NO: 2237) | | |
| CEP290-1431 | − | AUAUAAGUCUUUUGAUAU | 18 | downstream |
| | | (SEQ ID NO: 2238) | | |
| CEP290-1432 | − | AAGAAUGGAAUAGAUAAUA | 19 | downstream |
| | | (SEQ ID NO: 2239) | | |
| CEP290-1433 | − | AGAAUGGAAUAGAUAAUA | 18 | downstream |
| | | (SEQ ID NO: 2240) | | |
| CEP290-1434 | − | AAAACUGGAUGGGUAAUAAAGCAA | 24 | downstream |
| | | (SEQ ID NO: 2241) | | |
| CEP290-1435 | − | AAACUGGAUGGGUAAUAAAGCAA | 23 | downstream |
| | | (SEQ ID NO: 2242) | | |
| CEP290-1436 | − | AACUGGAUGGGUAAUAAAGCAA | 22 | downstream |
| | | (SEQ ID NO: 2243) | | |
| CEP290-1437 | − | ACUGGAUGGGUAAUAAAGCAA | 21 | downstream |
| | | (SEQ ID NO: 2244) | | |
| CEP290-1438 | + | AUAGAAAUUCACUGAGCAAAACAA | 24 | downstream |
| | | (SEQ ID NO: 2245) | | |
| CEP290-1439 | + | AGAAAUUCACUGAGCAAAACAA | 22 | downstream |
| | | (SEQ ID NO: 2246) | | |
| CEP290-1440 | + | AAAUUCACUGAGCAAAACAA | 20 | downstream |
| | | (SEQ ID NO: 808) | | |
| CEP290-1441 | + | AAUUCACUGAGCAAAACAA | 19 | downstream |
| | | (SEQ ID NO: 2248) | | |
| CEP290-1442 | + | AUUCACUGAGCAAAACAA | 18 | downstream |
| | | (SEQ ID NO: 2249) | | |
| CEP290-1443 | + | AGGAUGUAAGACUGGAGAUAGAGA | 24 | downstream |
| | | (SEQ ID NO: 2250) | | |
| CEP290-1444 | + | AUGUAAGACUGGAGAUAGAGA | 21 | downstream |
| | | (SEQ ID NO: 2251) | | |
| CEP290-1445 | − | AAAUUUGAUAGUAGAAGAAAA | 21 | downstream |
| | | (SEQ ID NO: 2252) | | |
| CEP290-1446 | − | AAUUUGAUAGUAGAAGAAAA | 20 | downstream |
| | | (SEQ ID NO: 2253) | | |
| CEP290-1447 | − | AUUUGAUAGUAGAAGAAAA | 19 | downstream |
| | | (SEQ ID NO: 2254) | | |
| CEP290-1448 | + | AAAAUAAAACUAAGACACUGCCAA | 24 | downstream |
| | | (SEQ ID NO: 1036) | | |
| CEP290-1449 | + | AAAUAAAACUAAGACACUGCCAA | 23 | downstream |
| | | (SEQ ID NO: 1037) | | |
| CEP290-1450 | + | AAUAAAACUAAGACACUGCCAA | 22 | downstream |
| | | (SEQ ID NO: 1038) | | |
| CEP290-1451 | + | AUAAAACUAAGACACUGCCAA | 21 | downstream |
| | | (SEQ ID NO: 1039) | | |
| CEP290-1452 | + | AAAACUAAGACACUGCCAA | 19 | downstream |
| | | (SEQ ID NO: 1040) | | |
| CEP290-1453 | + | AAACUAAGACACUGCCAA | 18 | downstream |
| | | (SEQ ID NO: 1041) | | |
| CEP290-1454 | − | AAUAAAGCAAAAGAAAAAC | 19 | downstream |
| | | (SEQ ID NO: 2261) | | |
| CEP290-1455 | − | AUAAAGCAAAAGAAAAAC | 18 | downstream |
| | | (SEQ ID NO: 2262) | | |
| CEP290-1456 | − | AUUCUUUUUUUGUUGUUUUUUUUU | 24 | downstream |
| | | (SEQ ID NO: 2263) | | |
| CEP290-1457 | + | ACUCCAGCCUGGGCAACACA | 20 | downstream |
| | | (SEQ ID NO: 2264) | | |
| CEP290-1458 | − | CUUACCUCAUGUCAUCUAGAGC | 22 | downstream |
| | | (SEQ ID NO: 2265) | | |
| CEP290-1459 | − | CCUCAUGUCAUCUAGAGC | 18 | downstream |
| | | (SEQ ID NO: 2266) | | |
| CEP290-1460 | + | CAGUUUUUAAGGCGGGGAGUCAC | 23 | downstream |
| | | (SEQ ID NO: 2267) | | |
| CEP290-1461 | − | CACAGAGUUCAAGCUAAUAC | 20 | downstream |
| | | (SEQ ID NO: 845) | | |
| CEP290-1462 | − | CAGAGUUCAAGCUAAUAC | 18 | downstream |
| | | (SEQ ID NO: 2269) | | |
| CEP290-1463 | + | CUUGAACUCUGUGCCAAAC | 19 | downstream |
| | | (SEQ ID NO: 2270) | | |
| CEP290-1464 | − | CAUGUGGUGUCAAAUAUGGUGCU | 23 | downstream |
| | | (SEQ ID NO: 2271) | | |
| CEP290-1465 | − | CAUGUGGUGUCAAAUAUGGUGCUU | 24 | downstream |
| | | (SEQ ID NO: 2272) | | |
| CEP290-1466 | + | CUCUAGAUGACAUGAGGUAAGU | 22 | downstream |
| | | (SEQ ID NO: 2273) | | |
| CEP290-1467 | + | CUAGAUGACAUGAGGUAAGU | 20 | downstream |
| | | (SEQ ID NO: 671) | | |
| CEP290-1468 | − | CUAAUACAUGAGAGUGAUUAGUGG | 24 | downstream |
| | | (SEQ ID NO: 2275) | | |
| CEP290-1469 | − | CAUGAGAGUGAUUAGUGG | 18 | downstream |
| | | (SEQ ID NO: 2276) | | |
| CEP290-509 | + | CACUGCCAAUAGGGAUAGGU | 20 | downstream |
| | | (SEQ ID NO: 613) | | |
| CEP290-511 | + | CUGCCAAUAGGGAUAGGU | 18 | downstream |
| | | (SEQ ID NO: 1046) | | |
| CEP290-1470 | + | CCAAACAGGAGAUACUCAACACA | 23 | downstream |
| | | (SEQ ID NO: 2278) | | |
| CEP290-1471 | + | CAAACAGGAGAUACUCAACACA | 22 | downstream |
| | | (SEQ ID NO: 2279) | | |
| CEP290-1472 | + | CAGGAGAUACUCAACACA | 18 | downstream |
| | | (SEQ ID NO: 2280) | | |
| CEP290-1473 | + | CACGUACAAAAGAACAUACAU | 21 | downstream |
| | | (SEQ ID NO: 2281) | | |
| CEP290-1474 | + | CGUACAAAAGAACAUACAU | 19 | downstream |
| | | (SEQ ID NO: 2282) | | |
| CEP290-1475 | + | CAGUAAGGAGGAUGUAAGAC | 20 | downstream |
| | | (SEQ ID NO: 676) | | |
| CEP290-1476 | + | CUUUUGACAGUUUUUAAGG | 19 | downstream |
| | | (SEQ ID NO: 2284) | | |
| CEP290-1477 | − | CGUGCUCUUUUCUAUAUAU | 19 | downstream |
| | | (SEQ ID NO: 2285) | | |
| CEP290-1478 | + | CACUGAGCAAAACAACUGG | 19 | downstream |
| | | (SEQ ID NO: 2286) | | |
| CEP290-1479 | + | CCUGAACAAGULUUGAAACAGGAA | 24 | downstream |
| | | (SEQ ID NO: 2287) | | |
| CEP290-1480 | + | CUGAACAAGUUUUGAAACAGGAA | 23 | downstream |
| | | (SEQ ID NO: 2288) | | |
| CEP290-1481 | + | CAAGUUUUGAAACAGGAA | 18 | downstream |
| | | (SEQ ID NO: 2289) | | |
| CEP290-1482 | + | CCUGAACAAGUUUUGAAA | 18 | downstream |
| | | (SEQ ID NO: 2290) | | |
| CEP290-1483 | + | CACUGAGCAAAACAACUGGAA | 21 | downstream |
| | | (SEQ ID NO: 2291) | | |
| CEP290-1484 | + | CUGAGCAAAACAACUGGAA | 19 | downstream |
| | | (SEQ ID NO: 2292) | | |
| CEP290-1485 | − | CGUGCUCUUUUCUAUAUA | 18 | downstream |
| | | (SEQ ID NO: 2293) | | |
| CEP290-1486 | + | CUAUUCCAUUCUUCACAC | 18 | downstream |
| | | (SEQ ID NO: 2294) | | |
| CEP290-1487 | − | CUUAGGAAAUUAUUGUUGCUUU | 22 | downstream |
| | | (SEQ ID NO: 2295) | | |
| CEP290-1488 | − | CUUUUUGAGAGGUAAAGGUUC | 21 | downstream |
| | | (SEQ ID NO: 2296) | | |
| CEP290-1489 | + | CACUGAGCAAAACAACUGGAAGA | 23 | downstream |
| | | (SEQ ID NO: 2297) | | |
| CEP290-1490 | + | CUGAGCAAAACAACUGGAAGA | 21 | downstream |
| | | (SEQ ID NO: 2298) | | |
| CEP290-1491 | + | CAUAAGAAAGAACACUGUGGU | 21 | downstream |
| | | (SEQ ID NO: 2299) | | |
| CEP290-1492 | − | CUUGAAAUUUGAUAGUAG | 18 | downstream |
| | | (SEQ ID NO: 2300) | | |
| CEP290-1493 | + | CCAUUAAAAAAAGUAUGCUU | 20 | downstream |
| | | (SEQ ID NO: 857) | | |
| CEP290-1494 | + | CAUUAAAAAAAGUAUGCUU | 19 | downstream |
| | | (SEQ ID NO: 2302) | | |
| CEP290-1495 | + | CAAAAGACUUAUAUUCCAUU | 20 | downstream |
| | | (SEQ ID NO: 842) | | |
| CEP290-1496 | − | CAGAUUUCAUGUGUGAAGA | 19 | downstream |
| | | (SEQ ID NO: 2304) | | |
| CEP290-1497 | − | CUGGAUGGGUAAUAAAGCAA | 20 | downstream |
| | | (SEQ ID NO: 2305) | | |
| CEP290-1498 | − | CUUAAGCAUACUUUUUUUA | 19 | downstream |
| | | (SEQ ID NO: 2306) | | |
| CEP290-1499 | − | CUUUUUUUGUUGUUUUUUUUU | 21 | downstream |
| | | (SEQ ID NO: 2307) | | |
| CEP290-1500 | + | CUGCACUCCAGCCUGGGCAACACA | 24 | downstream |
| | | (SEQ ID NO: 2308) | | |
| CEP290-1501 | + | CACUCCAGCCUGGGCAACACA | 21 | downstream |
| | | (SEQ ID NO: 2309) | | |
| CEP290-1502 | + | CUCCAGCCUGGGCAACACA | 19 | downstream |
| | | (SEQ ID NO: 2310) | | |
| CEP290-1503 | + | GUUUUUAAGGCGGGGAGUCAC | 21 | downstream |
| | | (SEQ ID NO: 2311) | | |
| CEP290-230 | − | GGCACAGAGUUCAAGCUAAUAC | 22 | downstream |
| | | (SEQ ID NO: 2312) | | |
| CEP290-1504 | − | GCACAGAGUUCAAGCUAAUAC | 21 | downstream |
| | | (SEQ ID NO: 2313) | | |
| CEP290-1505 | + | GCUUGAACUCUGUGCCAAAC | 20 | downstream |
| | | (SEQ ID NO: 461) | | |
| CEP290-139 | − | GCAUGUGGUGUCAAAUAUGGUGCU | 24 | downstream |
| | | (SEQ ID NO: 2314) | | |
| CEP290-1506 | − | GUGGUGUCAAAUAUGGUGCU | 20 | downstream |
| | | (SEQ ID NO: 782) | | |
| CEP290-1507 | − | GGUGUCAAAUAUGGUGCU | 18 | downstream |
| | | (SEQ ID NO: 2316) | | |
| CEP290-1508 | − | GUGGUGUCAAAUAUGGUGCUU | 21 | downstream |
| | | (SEQ ID NO: 2317) | | |
| CEP290-1509 | − | GGUGUCAAAUAUGGUGCUU | 19 | downstream |
| | | (SEQ ID NO: 2318) | | |
| CEP290-1510 | − | GUGUCAAAUAUGGUGCUU | 18 | downstream |
| | | (SEQ ID NO: 2319) | | |
| CEP290-1511 | + | GCUCUAGAUGACAUGAGGUAAGU | 23 | downstream |
| | | (SEQ ID NO: 2320) | | |
| CEP290-11 | + | GACACUGCCAAUAGGGAUAGGU | 22 | downstream |
| | | (SEQ ID NO: 1047) | | |
| CEP290-1512 | − | GGUUCAUGAGACUAGAGGUC | 20 | downstream |
| | | (SEQ ID NO: 2322) | | |
| CEP290-1513 | − | GUUCAUGAGACUAGAGGUC | 19 | downstream |
| | | (SEQ ID NO: 2323) | | |
| CEP290-1514 | + | GCCAAACAGGAGAUACUCAACACA | 24 | downstream |
| | | (SEQ ID NO: 2324) | | |
| CEP290-1515 | + | GAGCACGUACAAAAGAACAUACAU | 24 | downstream |
| | | (SEQ ID NO: 2325) | | |
| CEP290-1516 | + | GCACGUACAAAAGAACAUACAU | 22 | downstream |
| | | (SEQ ID NO: 2326) | | |
| CEP290-1517 | + | GUACAAAAGAACAUACAU | 18 | downstream |
| | | (SEQ ID NO: 2327) | | |
| CEP290-1518 | + | GUGGCAGUAAGGAGGAUGUAAGAC | 24 | downstream |
| | | (SEQ ID NO: 2328) | | |
| CEP290-1519 | + | GGCAGUAAGGAGGAUGUAAGAC | 22 | downstream |
| | | (SEQ ID NO: 2329) | | |
| CEP290-1520 | + | GCAGUAAGGAGGAUGUAAGAC | 21 | downstream |
| | | (SEQ ID NO: 2330) | | |
| CEP290-1521 | + | GUAAGGAGGAUGUAAGAC | 18 | downstream |
| | | (SEQ ID NO: 2331) | | |
| CEP290-1522 | + | GGUAGCUUUUGACAGUUUUUAAGG | 24 | downstream |
| | | (SEQ ID NO: 2332) | | |
| CEP290-1523 | + | GUAGCUUUUGACAGUUUUUAAGG | 23 | downstream |
| | | (SEQ ID NO: 2333) | | |
| CEP290-1524 | + | GCUUUUGACAGUUUUUAAGG | 20 | downstream |
| | | (SEQ ID NO: 482) | | |
| CEP290-1525 | − | GUACGUGCUCUUUUCUAUAUAU | 22 | downstream |
| | | (SEQ ID NO: 2334) | | |
| CEP290-1526 | − | GUGCUCUUUUCUAUAUAU | 18 | downstream |
| | | (SEQ ID NO: 2335) | | |
| CEP290-1527 | + | GAACAAGUUUUGAAACAGGAA | 21 | downstream |
| | | (SEQ ID NO: 2336) | | |
| CEP290-1528 | + | GUAAUGCCUGAACAAGUUUUGAAA | 24 | downstream |
| | | (SEQ ID NO: 2337) | | |
| CEP290-1529 | + | GCCUGAACAAGUUUUGAAA | 19 | downstream |
| | | (SEQ ID NO: 2338) | | |
| CEP290-1530 | + | GGUAAUGCCUGAACAAGUU | 19 | downstream |
| | | (SEQ ID NO: 2339) | | |
| CEP290-1531 | + | GUAAUGCCUGAACAAGUU | 18 | downstream |
| | | (SEQ ID NO: 2340) | | |
| CEP290-1532 | − | GUACGUGCUCUUUUCUAUAUA | 21 | downstream |
| | | (SEQ ID NO: 2341) | | |
| CEP290-1533 | + | GAGAGAAAUGGUUCCCUAUAUA | 22 | downstream |
| | | (SEQ ID NO: 2342) | | |
| CEP290-1534 | + | GAGAAAUGGUUCCCUAUAUA | 20 | downstream |
| | | (SEQ ID NO: 771) | | |
| CEP290-1535 | + | GAAAUGGUUCCCUAUAUA | 18 | downstream |
| | | (SEQ ID NO: 2344) | | |
| CEP290-1536 | − | GCUUAGGAAAUUAUUGUUGCUUU | 23 | downstream |
| | | (SEQ ID NO: 2345) | | |
| CEP290-1537 | − | GGAAAUUAUUGUUGCUUU | 18 | downstream |
| | | (SEQ ID NO: 2346) | | |
| CEP290-1538 | − | GCUUUUUGAGAGGUAAAGGUUC | 22 | downstream |
| | | (SEQ ID NO: 2347) | | |
| CEP290-1539 | + | GAGCAAAACAACUGGAAGA | 19 | downstream |
| | | (SEQ ID NO: 2348) | | |
| CEP290-1540 | − | GUGUGAAGAAUGGAAUAGAUAAU | 23 | downstream |
| | | (SEQ ID NO: 2349) | | |
| CEP290-1541 | − | GUGAAGAAUGGAAUAGAUAAU | 21 | downstream |
| | | (SEQ ID NO: 2350) | | |
| CEP290-1542 | − | GAAGAAUGGAAUAGAUAAU | 19 | downstream |
| | | (SEQ ID NO: 2351) | | |
| CEP290-1543 | + | GUAAGGAGGAUGUAAGACUGGAGA | 24 | downstream |
| | | (SEQ ID NO: 2352) | | |
| CEP290-1544 | + | GGAGGAUGUAAGACUGGAGA | 20 | downstream |
| | | (SEQ ID NO: 779) | | |
| CEP290-1545 | + | GAGGAUGUAAGACUGGAGA | 19 | downstream |
| | | (SEQ ID NO: 2354) | | |
| CEP290-1546 | − | GAAAAACUUGAAAUUUGAUAGUAG | 24 | downstream |
| | | (SEQ ID NO: 2355) | | |
| CEP290-1547 | − | GUGUUUACAUAUCUGUCUUCCUUA | 24 | downstream |
| | | (SEQ ID NO: 2356) | | |
| CEP290-1548 | − | GUUUACAUAUCUGUCUUCCUUA | 22 | downstream |
| | | (SEQ ID NO: 2357) | | |
| CEP290-1549 | + | GUUCCAUUAAAAAAAGUAUGCUU | 23 | downstream |
| | | (SEQ ID NO: 2358) | | |
| CEP290-1550 | − | GGAAUAUAAGUCUUUUGAUAU | 21 | downstream |
| | | (SEQ ID NO: 2359) | | |
| CEP290-1551 | − | GAAUAUAAGUCUUUUGAUAU | 20 | downstream |
| | | (SEQ ID NO: 770) | | |
| CEP290-1552 | − | GUGUGAAGAAUGGAAUAGAUAAUA | 24 | downstream |
| | | (SEQ ID NO: 2361) | | |
| CEP290-1553 | − | GUGAAGAAUGGAAUAGAUAAUA | 22 | downstream |
| | | (SEQ ID NO: 2362) | | |
| CEP290-1554 | − | GAAGAAUGGAAUAGAUAAUA | 20 | downstream |
| | | (SEQ ID NO: 467) | | |
| CEP290-1555 | − | GGAUGGGUAAUAAAGCAA | 18 | downstream |
| | | (SEQ ID NO: 2363) | | |
| CEP290-1556 | + | GAAAUUCACUGAGCAAAACAA | 21 | downstream |
| | | (SEQ ID NO: 2364) | | |
| CEP290-1557 | + | GGAUGUAAGACUGGAGAUAGAGA | 23 | downstream |
| | | (SEQ ID NO: 2365) | | |
| CEP290-1558 | + | GAUGUAAGACUGGAGAUAGAGA | 22 | downstream |
| | | (SEQ ID NO: 2366) | | |
| CEP290-1559 | + | GUAAGACUGGAGAUAGAGA | 19 | downstream |
| | | (SEQ ID NO: 2367) | | |
| CEP290-1560 | − | GAAAUUUGAUAGUAGAAGAAAA | 22 | downstream |
| | | (SEQ ID NO: 2368) | | |
| CEP290-1561 | − | GGGUAAUAAAGCAAAAGAAAAAC | 23 | downstream |
| | | (SEQ ID NO: 2369) | | |
| CEP290-1562 | − | GGUAAUAAAGCAAAAGAAAAAC | 22 | downstream |
| | | (SEQ ID NO: 2370) | | |
| CEP290-1563 | − | GUAAUAAAGCAAAAGAAAAAC | 21 | downstream |
| | | (SEQ ID NO: 2371) | | |
| CEP290-1564 | + | GCACUCCAGCCUGGGCAACACA | 22 | downstream |
| | | (SEQ ID NO: 2372) | | |
| CEP290-1565 | − | UACUUACCUCAUGUCAUCUAGAGC | 24 | downstream |
| | | (SEQ ID NO: 2373) | | |
| CEP290-1566 | − | UUACCUCAUGUCAUCUAGAGC | 21 | downstream |
| | | (SEQ ID NO: 2374) | | |
| CEP290-1567 | − | UACCUCAUGUCAUCUAGAGC | 20 | downstream |
| | | (SEQ ID NO: 876) | | |
| CEP290-1568 | + | UUUUUAAGGCGGGGAGUCAC | 20 | downstream |
| | | (SEQ ID NO: 909) | | |
| CEP290-1569 | + | UUUUAAGGCGGGGAGUCAC | 19 | downstream |
| | | (SEQ ID NO: 2377) | | |
| CEP290-1570 | + | UUUAAGGCGGGGAGUCAC | 18 | downstream |
| | | (SEQ ID NO: 2378) | | |
| CEP290-1571 | − | UUGGCACAGAGUUCAAGCUAAUAC | 24 | downstream |
| | | (SEQ ID NO: 2379) | | |
| CEP290-1572 | − | UGGCACAGAGUUCAAGCUAAUAC | 23 | downstream |
| | | (SEQ ID NO: 2380) | | |
| CEP290-1573 | + | UUAGCUUGAACUCUGUGCCAAAC | 23 | downstream |
| | | (SEQ ID NO: 2381) | | |
| CEP290-1574 | + | UAGCUUGAACUCUGUGCCAAAC | 22 | downstream |
| | | (SEQ ID NO: 2382) | | |
| CEP290-1575 | + | UUGAACUCUGUGCCAAAC | 18 | downstream |
| | | (SEQ ID NO: 2383) | | |
| CEP290-1576 | − | UGUGGUGUCAAAUAUGGUGCU | 21 | downstream |
| | | (SEQ ID NO: 2384) | | |
| CEP290-1577 | − | UGGUGUCAAAUAUGGUGCU | 19 | downstream |
| | | (SEQ ID NO: 2385) | | |
| CEP290-1578 | − | UGUGGUGUCAAAUAUGGUGCUU | 22 | downstream |
| | | (SEQ ID NO: 2386) | | |
| CEP290-1579 | − | UGGUGUCAAAUAUGGUGCUU | 20 | downstream |
| | | (SEQ ID NO: 625) | | |
| CEP290-1580 | + | UGCUCUAGAUGACAUGAGGUAAGU | 24 | downstream |
| | | (SEQ ID NO: 2388) | | |
| CEP290-1581 | + | UCUAGAUGACAUGAGGUAAGU | 21 | downstream |
| | | (SEQ ID NO: 2389) | | |
| CEP290-1582 | + | UAGAUGACAUGAGGUAAGU | 19 | downstream |
| | | (SEQ ID NO: 2390) | | |
| CEP290-1583 | − | UAAUACAUGAGAGUGAUUAGUGG | 23 | downstream |
| | | (SEQ ID NO: 2391) | | |
| CEP290-1584 | − | UACAUGAGAGUGAUUAGUGG | 20 | downstream |
| | | (SEQ ID NO: 628) | | |
| CEP290-1585 | − | UAAAGGUUCAUGAGACUAGAGGUC | 24 | downstream |
| | | (SEQ ID NO: 2392) | | |
| CEP290-1586 | − | UUCAUGAGACUAGAGGUC | 18 | downstream |
| | | (SEQ ID NO: 2393) | | |
| CEP290-1587 | + | UGGCAGUAAGGAGGAUGUAAGAC | 23 | downstream |
| | | (SEQ ID NO: 2394) | | |
| CEP290-1588 | + | UAGCUUUUGACAGUUUUUAAGG | 22 | downstream |
| | | (SEQ ID NO: 2395) | | |
| CEP290-1589 | + | UUUUGACAGUUUUUAAGG | 18 | downstream |
| | | (SEQ ID NO: 2396) | | |
| CEP290-1590 | − | UUGUACGUGCUCUUUUCUAUAUAU | 24 | downstream |
| | | (SEQ ID NO: 2397) | | |
| CEP290-1591 | − | UGUACGUGCUCUUUUCUAUAUAU | 23 | downstream |
| | | (SEQ ID NO: 2398) | | |
| CEP290-1592 | − | UACGUGCUCUUUUCUAUAUAU | 21 | downstream |
| | | (SEQ ID NO: 2399) | | |
| CEP290-1593 | + | UUCACUGAGCAAAACAACUGG | 21 | downstream |
| | | (SEQ ID NO: 2400) | | |
| CEP290-1594 | + | UCACUGAGCAAAACAACUGG | 20 | downstream |
| | | (SEQ ID NO: 883) | | |
| CEP290-1595 | + | UGAACAAGUUUUGAAACAGGAA | 22 | downstream |
| | | (SEQ ID NO: 2402) | | |
| CEP290-1596 | + | UAAUGCCUGAACAAGUUUUGAAA | 23 | downstream |
| | | (SEQ ID NO: 2403) | | |
| CEP290-1597 | + | UGCCUGAACAAGUUUUGAAA | 20 | downstream |
| | | (SEQ ID NO: 897) | | |
| CEP290-1598 | + | UUCACUGAGCAAAACAACUGGAA | 23 | downstream |
| | | (SEQ ID NO: 2405) | | |
| CEP290-1599 | + | UCACUGAGCAAAACAACUGGAA | 22 | downstream |
| | | (SEQ ID NO: 2406) | | |
| CEP290-1600 | + | UGAGCAAAACAACUGGAA | 18 | downstream |
| | | (SEQ ID NO: 2407) | | |
| CEP290-1601 | − | UUUGUACGUGCUCUUUUCUAUAUA | 24 | downstream |
| | | (SEQ ID NO: 2408) | | |
| CEP290-1602 | − | UUGUACGUGCUCUUUUCUAUAUA | 23 | downstream |
| | | (SEQ ID NO: 2409) | | |
| CEP290-1603 | − | UGUACGUGCUCUUUUCUAUAUA | 22 | downstream |
| | | (SEQ ID NO: 2410) | | |
| CEP290-1604 | − | UACGUGCUCUUUUCUAUAUA | 20 | downstream |
| | | (SEQ ID NO: 877) | | |
| CEP290-1605 | + | UAUUAUCUAUUCCAUUCUUCACAC | 24 | downstream |
| | | (SEQ ID NO: 2412) | | |
| CEP290-1606 | + | UUAUCUAUUCCAUUCUUCACAC | 22 | downstream |
| | | (SEQ ID NO: 2413) | | |
| CEP290-1607 | + | UAUCUAUUCCAUUCUUCACAC | 21 | downstream |
| | | (SEQ ID NO: 2414) | | |
| CEP290-1608 | + | UCUAUUCCAUUCUUCACAC | 19 | downstream |
| | | (SEQ ID NO: 2415) | | |
| CEP290-1609 | − | UGCUUAGGAAAUUAUUGUUGCUUU | 24 | downstream |
| | | (SEQ ID NO: 2416) | | |
| CEP290-1610 | − | UUAGGAAAUUAUUGUUGCUUU | 21 | downstream |
| | | (SEQ ID NO: 2417) | | |
| CEP290-1611 | − | UAGGAAAUUAUUGUUGCUUU | 20 | downstream |
| | | (SEQ ID NO: 2418) | | |
| CEP290-1612 | − | UUGCUUUUUGAGAGGUAAAGGUUC | 24 | downstream |
| | | (SEQ ID NO: 2419) | | |
| CEP290-1613 | − | UGCUUUUUGAGAGGUAAAGGUUC | 23 | downstream |
| | | (SEQ ID NO: 2420) | | |
| CEP290-1614 | − | UUUUUGAGAGGUAAAGGUUC | 20 | downstream |
| | | (SEQ ID NO: 2421) | | |
| CEP290-1615 | − | UUUUGAGAGGUAAAGGUUC | 19 | downstream |
| | | (SEQ ID NO: 2422) | | |
| CEP290-1616 | − | UUUGAGAGGUAAAGGUUC | 18 | downstream |
| | | (SEQ ID NO: 2423) | | |
| CEP290-1617 | + | UCACUGAGCAAAACAACUGGAAGA | 24 | downstream |
| | | (SEQ ID NO: 2424) | | |
| CEP290-1618 | + | UGAGCAAAACAACUGGAAGA | 20 | downstream |
| | | (SEQ ID NO: 894) | | |
| CEP290-1619 | + | UACAUAAGAAAGAACACUGUGGU | 23 | downstream |
| | | (SEQ ID NO: 2426) | | |
| CEP290-1620 | + | UAAGAAAGAACACUGUGGU | 19 | downstream |
| | | (SEQ ID NO: 2427) | | |
| CEP290-1621 | − | UGUGUGAAGAAUGGAAUAGAUAAU | 24 | downstream |
| | | (SEQ ID NO: 2428) | | |
| CEP290-1622 | − | UGUGAAGAAUGGAAUAGAUAAU | 22 | downstream |
| | | (SEQ ID NO: 2429) | | |
| CEP290-1623 | − | UGAAGAAUGGAAUAGAUAAU | 20 | downstream |
| | | (SEQ ID NO: 2430) | | |
| CEP290-1624 | + | UAAGGAGGAUGUAAGACUGGAGA | 23 | downstream |
| | | (SEQ ID NO: 2431) | | |
| CEP290-1625 | − | UGUUUACAUAUCUGUCUUCCUUA | 23 | downstream |
| | | (SEQ ID NO: 2432) | | |
| CEP290-1626 | − | UUUACAUAUCUGUCUUCCUUA | 21 | downstream |
| | | (SEQ ID NO: 2433) | | |
| CEP290-1627 | − | UUACAUAUCUGUCUUCCUUA | 20 | downstream |
| | | (SEQ ID NO: 901) | | |
| CEP290-1628 | − | UACAUAUCUGUCUUCCUUA | 19 | downstream |
| | | (SEQ ID NO: 2435) | | |
| CEP290-1629 | + | UGUUCCAUUAAAAAAAGUAUGCUU | 24 | downstream |
| | | (SEQ ID NO: 2436) | | |
| CEP290-1630 | + | UUCCAUUAAAAAAAGUAUGCUU | 22 | downstream |
| | | (SEQ ID NO: 2437) | | |
| CEP290-1631 | + | UCCAUUAAAAAAAGUAUGCUU | 21 | downstream |
| | | (SEQ ID NO: 2438) | | |
| CEP290-1632 | + | UAUCAAAAGACUUAUAUUCCAUU | 23 | downstream |
| | | (SEQ ID NO: 2439) | | |
| CEP290-1633 | + | UCAAAAGACUUAUAUUCCAUU | 21 | downstream |
| | | (SEQ ID NO: 2440) | | |
| CEP290-1634 | − | UCAGAUUUCAUGUGUGAAGA | 20 | downstream |
| | | (SEQ ID NO: 2441) | | |
| CEP290-1635 | − | UGGAAUAUAAGUCUUUUGAUAU | 22 | downstream |
| | | (SEQ ID NO: 2442) | | |
| CEP290-1636 | − | UGUGAAGAAUGGAAUAGAUAAUA | 23 | downstream |
| | | (SEQ ID NO: 2443) | | |
| CEP290-1637 | − | UGAAGAAUGGAAUAGAUAAUA | 21 | downstream |
| | | (SEQ ID NO: 2444) | | |
| CEP290-1638 | − | UGGAUGGGUAAUAAAGCAA | 19 | downstream |
| | | (SEQ ID NO: 2445) | | |
| CEP290-1639 | + | UAGAAAUUCACUGAGCAAAACAA | 23 | downstream |
| | | (SEQ ID NO: 2446) | | |
| CEP290-1640 | + | UGUAAGACUGGAGAUAGAGA | 20 | downstream |
| | | (SEQ ID NO: 898) | | |
| CEP290-1641 | + | UAAGACUGGAGAUAGAGA | 18 | downstream |
| | | (SEQ ID NO: 2448) | | |
| CEP290-1642 | − | UUGAAAUUUGAUAGUAGAAGAAAA | 24 | downstream |
| | | (SEQ ID NO: 2449) | | |
| CEP290-1643 | − | UGAAAUUUGAUAGUAGAAGAAAA | 23 | downstream |
| | | (SEQ ID NO: 2450) | | |
| CEP290-1644 | − | UUUGAUAGUAGAAGAAAA | 18 | downstream |
| | | (SEQ ID NO: 2451) | | |
| CEP290-1645 | + | UAAAACUAAGACACUGCCAA | 20 | downstream |
| | | (SEQ ID NO: 871) | | |
| CEP290-1646 | − | UUUUUCUUAAGCAUACUUUUUUUA | 24 | downstream |
| | | (SEQ ID NO: 2453) | | |
| CEP290-1647 | − | UUUUCUUAAGCAUACUUUUUUUA | 23 | downstream |
| | | (SEQ ID NO: 2454) | | |
| CEP290-1648 | − | UUUCUUAAGCAUACUUUUUUUA | 22 | downstream |
| | | (SEQ ID NO: 2455) | | |
| CEP290-1649 | − | UUCUUAAGCAUACUUUUUUUA | 21 | downstream |
| | | (SEQ ID NO: 2456) | | |
| CEP290-1650 | − | UCUUAAGCAUACUUUUUUUA | 20 | downstream |
| | | (SEQ ID NO: 891) | | |
| CEP290-1651 | − | UUAAGCAUACUUUUUUUA | 18 | downstream |
| | | (SEQ ID NO: 2458) | | |
| CEP290-1652 | − | UGGGUAAUAAAGCAAAAGAAAAAC | 24 | downstream |
| | | (SEQ ID NO: 2459) | | |
| CEP290-1653 | − | UAAUAAAGCAAAAGAAAAAC | 20 | downstream |
| | | (SEQ ID NO: 2460) | | |
| CEP290-1654 | − | UUCUUUUUUUGUUGUUUUUUUUU | 23 | downstream |
| | | (SEQ ID NO: 2461) | | |
| CEP290-1655 | − | UCUUUUUUUGUUGUUUUUUUUU | 22 | downstream |
| | | (SEQ ID NO: 2462) | | |
| CEP290-1656 | − | UUUUUUUGUUGUUUUUUUUU | 20 | downstream |
| | | (SEQ ID NO: 2463) | | |
| CEP290-1657 | − | UUUUUUGUUGUUUUUUUUU | 19 | downstream |
| | | (SEQ ID NO: 2464) | | |
| CEP290-1658 | − | UUUUUGUUGUUUUUUUUU | 18 | downstream |
| | | (SEQ ID NO: 2465) | | |
| CEP290-1659 | + | UGCACUCCAGCCUGGGCAACACA | 23 | downstream |
| | | (SEQ ID NO: 2466) | | |
| CEP290-1660 | + | UCCAGCCUGGGCAACACA | 18 | downstream |
| | | (SEQ ID NO: 2467) | | |
| CEP290-1661 | + | AUUUUCGUGACCUCUAGUCUC | 21 | downstream |
| | | (SEQ ID NO: 2468) | | |
| CEP290-1662 | + | ACUAAUCACUCUCAUGUAUUAGC | 23 | downstream |
| | | (SEQ ID NO: 2469) | | |
| CEP290-1663 | + | AAUCACUCUCAUGUAUUAGC | 20 | downstream |
| | | (SEQ ID NO: 814) | | |
| CEP290-1664 | + | AUCACUCUCAUGUAUUAGC | 19 | downstream |
| | | (SEQ ID NO: 2471) | | |
| CEP290-1665 | + | AGAUGACAUGAGGUAAGUA | 19 | downstream |
| | | (SEQ ID NO: 2472) | | |
| CEP290-1666 | − | ACCUCAUGUCAUCUAGAGCAAGAG | 24 | downstream |
| | | (SEQ ID NO: 2473) | | |
| CEP290-1667 | − | AUGUCAUCUAGAGCAAGAG | 19 | downstream |
| | | (SEQ ID NO: 2474) | | |
| CEP290-1668 | − | AAUACAUGAGAGUGAUUAGUGGUG | 24 | downstream |
| | | (SEQ ID NO: 2475) | | |
| CEP290-1669 | − | AUACAUGAGAGUGAUUAGUGGUG | 23 | downstream |
| | | (SEQ ID NO: 2476) | | |
| CEP290-1670 | − | ACAUGAGAGUGAUUAGUGGUG | 21 | downstream |
| | | (SEQ ID NO: 2477) | | |
| CEP290-1671 | − | AUGAGAGUGAUUAGUGGUG | 19 | downstream |
| | | (SEQ ID NO: 2478) | | |
| CEP290-1672 | − | ACGUGCUCUUUUCUAUAUAUA | 21 | downstream |
| | | (SEQ ID NO: 2479) | | |
| CEP290-1673 | + | ACAAAACCUAUGUAUAAGAUG | 21 | downstream |
| | | (SEQ ID NO: 2480) | | |
| CEP290-1674 | + | AAAACCUAUGUAUAAGAUG | 19 | downstream |
| | | (SEQ ID NO: 2481) | | |
| CEP290-1675 | + | AAACCUAUGUAUAAGAUG | 18 | downstream |
| | | (SEQ ID NO: 2482) | | |
| CEP290-1676 | + | AUAUAUAGAAAAGAGCACGUACAA | 24 | downstream |
| | | (SEQ ID NO: 2483) | | |
| CEP290-1677 | + | AUAUAGAAAAGAGCACGUACAA | 22 | downstream |
| | | (SEQ ID NO: 2484) | | |
| CEP290-1678 | + | AUAGAAAAGAGCACGUACAA | 20 | downstream |
| | | (SEQ ID NO: 832) | | |
| CEP290-1679 | + | AGAAAAGAGCACGUACAA | 18 | downstream |
| | | (SEQ ID NO: 2486) | | |
| CEP290-1680 | + | AGAAAUGGUUCCCUAUAUAUAGAA | 24 | downstream |
| | | (SEQ ID NO: 2487) | | |
| CEP290-1681 | + | AAAUGGUUCCCUAUAUAUAGAA | 22 | downstream |
| | | (SEQ ID NO: 2488) | | |
| CEP290-1682 | + | AAUGGUUCCCUAUAUAUAGAA | 21 | downstream |
| | | (SEQ ID NO: 2489) | | |
| CEP290-1683 | + | AUGGUUCCCUAUAUAUAGAA | 20 | downstream |
| | | (SEQ ID NO: 839) | | |
| CEP290-1684 | − | AUGGAAUAUAAGUCUUUUGAUAUA | 24 | downstream |
| | | (SEQ ID NO: 2491) | | |
| CEP290-1685 | − | AAUAUAAGUCUUUUGAUAUA | 20 | downstream |
| | | (SEQ ID NO: 687) | | |
| CEP290-1686 | − | AUAUAAGUCUUUUGAUAUA | 19 | downstream |
| | | (SEQ ID NO: 2493) | | |
| CEP290-1687 | + | ACGUACAAAAGAACAUACAUAAGA | 24 | downstream |
| | | (SEQ ID NO: 2494) | | |
| CEP290-1688 | + | ACAAAAGAACAUACAUAAGA | 20 | downstream |
| | | (SEQ ID NO: 816) | | |
| CEP290-1689 | + | AAAAGAACAUACAUAAGA | 18 | downstream |
| | | (SEQ ID NO: 2496) | | |
| CEP290-1690 | + | AAGAAAAAAAAGGUAAUGC | 19 | downstream |
| | | (SEQ ID NO: 2497) | | |
| CEP290-1691 | + | AGAAAAAAAAGGUAAUGC | 18 | downstream |
| | | (SEQ ID NO: 2498) | | |
| CEP290-1692 | + | AAACAGGAAUAGAAAUUCA | 19 | downstream |
| | | (SEQ ID NO: 2499) | | |
| CEP290-1693 | + | AACAGGAAUAGAAAUUCA | 18 | downstream |
| | | (SEQ ID NO: 2500) | | |
| CEP290-1694 | + | AAGAUCACUCCACUGCACUCCAGC | 24 | downstream |
| | | (SEQ ID NO: 2501) | | |
| CEP290-1695 | + | AGAUCACUCCACUGCACUCCAGC | 23 | downstream |
| | | (SEQ ID NO: 2502) | | |
| CEP290-1696 | + | AUCACUCCACUGCACUCCAGC | 21 | downstream |
| | | (SEQ ID NO: 2503) | | |
| CEP290-1697 | + | ACUCCACUGCACUCCAGC | 18 | downstream |
| | | (SEQ ID NO: 2504) | | |
| CEP290-1698 | − | CCCCUACUUACCUCAUGUCAUC | 22 | downstream |
| | | (SEQ ID NO: 2505) | | |
| CEP290-1699 | − | CCCUACUUACCUCAUGUCAUC | 21 | downstream |
| | | (SEQ ID NO: 2506) | | |
| CEP290-1700 | − | CCUACUUACCUCAUGUCAUC | 20 | downstream |
| | | (SEQ ID NO: 747) | | |
| CEP290-1701 | − | CUACUUACCUCAUGUCAUC | 19 | downstream |
| | | (SEQ ID NO: 2508) | | |
| CEP290-1702 | + | CUGAUUUUCGUGACCUCUAGUCUC | 24 | downstream |
| | | (SEQ ID NO: 2509) | | |
| CEP290-1703 | + | CACUAAUCACUCUCAUGUAUUAGC | 24 | downstream |
| | | (SEQ ID NO: 2510) | | |
| CEP290-1704 | + | CUAAUCACUCUCAUGUAUUAGC | 22 | downstream |
| | | (SEQ ID NO: 2511) | | |
| CEP290-1705 | + | CUCUAGAUGACAUGAGGUAAGUA | 23 | downstream |
| | | (SEQ ID NO: 2512) | | |
| CEP290-1706 | + | CUAGAUGACAUGAGGUAAGUA | 21 | downstream |
| | | (SEQ ID NO: 2513) | | |
| CEP290-1707 | − | CCUCAUGUCAUCUAGAGCAAGAG | 23 | downstream |
| | | (SEQ ID NO: 2514) | | |
| CEP290-1708 | − | CUCAUGUCAUCUAGAGCAAGAG | 22 | downstream |
| | | (SEQ ID NO: 2515) | | |
| CEP290-1709 | − | CAUGUCAUCUAGAGCAAGAG | 20 | downstream |
| | | (SEQ ID NO: 855) | | |
| CEP290-1710 | − | CAUGAGAGUGAUUAGUGGUG | 20 | downstream |
| | | (SEQ ID NO: 854) | | |
| CEP290-1711 | − | CGUGCUCUUUUCUAUAUAUA | 20 | downstream |
| | | (SEQ ID NO: 624) | | |
| CEP290-1712 | + | CAAAACCUAUGUAUAAGAUG | 20 | downstream |
| | | (SEQ ID NO: 841) | | |
| CEP290-1713 | + | CGUACAAAAGAACAUACAUAAGA | 23 | downstream |
| | | (SEQ ID NO: 2520) | | |
| CEP290-1714 | + | CAAAAGAACAUACAUAAGA | 19 | downstream |
| | | (SEQ ID NO: 2521) | | |
| CEP290-1715 | + | CUUAAGAAAAAAAAGGUAAUGC | 22 | downstream |
| | | (SEQ ID NO: 2522) | | |
| CEP290-1716 | − | CUUAAGCAUACUUUUUUUAA | 20 | downstream |
| | | (SEQ ID NO: 690) | | |
| CEP290-1717 | + | CACUCCACUGCACUCCAGC | 19 | downstream |
| | | (SEQ ID NO: 2524) | | |
| CEP290-132 | − | GUCCCCUACUUACCUCAUGUCAUC | 24 | downstream |
| | | (SEQ ID NO: 2525) | | |
| CEP290-1718 | + | GAUUUUCGUGACCUCUAGUCUC | 22 | downstream |
| | | (SEQ ID NO: 2526) | | |
| CEP290-1719 | + | GCUCUAGAUGACAUGAGGUAAGUA | 24 | downstream |
| | | (SEQ ID NO: 2527) | | |
| CEP290-1720 | + | GAUGACAUGAGGUAAGUA | 18 | downstream |
| | | (SEQ ID NO: 2528) | | |
| CEP290-1721 | − | GUACGUGCUCUUUUCUAUAUAUA | 23 | downstream |
| | | (SEQ ID NO: 2529) | | |
| CEP290-1722 | − | GUGCUCUUUUCUAUAUAUA | 19 | downstream |
| | | (SEQ ID NO: 2530) | | |
| CEP290-1723 | + | GUACAAAACCUAUGUAUAAGAUG | 23 | downstream |
| | | (SEQ ID NO: 2531) | | |
| CEP290-1724 | + | GAAAUGGUUCCCUAUAUAUAGAA | 23 | downstream |
| | | (SEQ ID NO: 2532) | | |
| CEP290-1725 | + | GGUUCCCUAUAUAUAGAA | 18 | downstream |
| | | (SEQ ID NO: 2533) | | |
| CEP290-1726 | − | GGAAUAUAAGUCUUUUGAUAUA | 22 | downstream |
| | | (SEQ ID NO: 2534) | | |
| CEP290-1727 | − | GAAUAUAAGUCUUUUGAUAUA | 21 | downstream |
| | | (SEQ ID NO: 2535) | | |
| CEP290-1728 | + | GUACAAAAGAACAUACAUAAGA | 22 | downstream |
| | | (SEQ ID NO: 2536) | | |
| CEP290-1729 | + | GCUUAAGAAAAAAAAGGUAAUGC | 23 | downstream |
| | | (SEQ ID NO: 2537) | | |
| CEP290-1730 | + | GAAACAGGAAUAGAAAUUCA | 20 | downstream |
| | | (SEQ ID NO: 769) | | |
| CEP290-1731 | + | GAUCACUCCACUGCACUCCAGC | 22 | downstream |
| | | (SEQ ID NO: 2539) | | |
| CEP290-1732 | − | UCCCCUACUUACCUCAUGUCAUC | 23 | downstream |
| | | (SEQ ID NO: 2540) | | |
| CEP290-1733 | − | UACUUACCUCAUGUCAUC | 18 | downstream |
| | | (SEQ ID NO: 2541) | | |
| CEP290-1734 | + | UGAUUUUCGUGACCUCUAGUCUC | 23 | downstream |
| | | (SEQ ID NO: 2542) | | |
| CEP290-1735 | + | UUUUCGUGACCUCUAGUCUC | 20 | downstream |
| | | (SEQ ID NO: 2543) | | |
| CEP290-1736 | + | UUUCGUGACCUCUAGUCUC | 19 | downstream |
| | | (SEQ ID NO: 2544) | | |
| CEP290-1737 | + | UUCGUGACCUCUAGUCUC | 18 | downstream |
| | | (SEQ ID NO: 2545) | | |
| CEP290-1738 | + | UAAUCACUCUCAUGUAUUAGC | 21 | downstream |
| | | (SEQ ID NO: 2546) | | |
| CEP290-1739 | + | UCACUCUCAUGUAUUAGC | 18 | downstream |
| | | (SEQ ID NO: 2547) | | |
| CEP290-1740 | + | UCUAGAUGACAUGAGGUAAGUA | 22 | downstream |
| | | (SEQ ID NO: 2548) | | |
| CEP290-1741 | + | UAGAUGACAUGAGGUAAGUA | 20 | downstream |
| | | (SEQ ID NO: 680) | | |
| CEP290-1742 | − | UCAUGUCAUCUAGAGCAAGAG | 21 | downstream |
| | | (SEQ ID NO: 2550) | | |
| CEP290-1743 | − | UGUCAUCUAGAGCAAGAG | 18 | downstream |
| | | (SEQ ID NO: 2551) | | |
| CEP290-1744 | − | UACAUGAGAGUGAUUAGUGGUG | 22 | downstream |
| | | (SEQ ID NO: 2552) | | |
| CEP290-1745 | − | UGAGAGUGAUUAGUGGUG | 18 | downstream |
| | | (SEQ ID NO: 2553) | | |
| CEP290-1746 | − | UGUACGUGCUCUUUUCUAUAUAUA | 24 | downstream |
| | | (SEQ ID NO: 2554) | | |
| CEP290-1747 | − | UACGUGCUCUULUCUAUAUAUA | 22 | downstream |
| | | (SEQ ID NO: 2555) | | |
| CEP290-1748 | − | UGCUCUUUUCUAUAUAUA | 18 | downstream |
| | | (SEQ ID NO: 2556) | | |
| CEP290-1749 | + | UGUACAAAACCUAUGUAUAAGAUG | 24 | downstream |
| | | (SEQ ID NO: 2557) | | |
| CEP290-1750 | + | UACAAAACCUAUGUAUAAGAUG | 22 | downstream |
| | | (SEQ ID NO: 2558) | | |
| CEP290-1751 | + | UAUAUAGAAAAGAGCACGUACAA | 23 | downstream |
| | | (SEQ ID NO: 2559) | | |
| CEP290-1752 | + | UAUAGAAAAGAGCACGUACAA | 21 | downstream |
| | | (SEQ ID NO: 2560) | | |
| CEP290-1753 | + | UAGAAAAGAGCACGUACAA | 19 | downstream |
| | | (SEQ ID NO: 2561) | | |
| CEP290-1754 | + | UGGUUCCCUAUAUAUAGAA | 19 | downstream |
| | | (SEQ ID NO: 2562) | | |
| CEP290-1755 | − | UGGAAUAUAAGUCUUUUGAUAUA | 23 | downstream |
| | | (SEQ ID NO: 2563) | | |
| CEP290-1756 | − | UAUAAGUCUUUUGAUAUA | 18 | downstream |
| | | (SEQ ID NO: 2564) | | |
| CEP290-1757 | + | UACAAAAGAACAUACAUAAGA | 21 | downstream |
| | | (SEQ ID NO: 2565) | | |
| CEP290-1758 | + | UGCUUAAGAAAAAAAAGGUAAUGC | 24 | downstream |
| | | (SEQ ID NO: 2566) | | |
| CEP290-1759 | + | UUAAGAAAAAAAAGGUAAUGC | 21 | downstream |
| | | (SEQ ID NO: 2567) | | |
| CEP290-1760 | + | UAAGAAAAAAAAGGUAAUGC | 20 | downstream |
| | | (SEQ ID NO: 872) | | |
| CEP290-1761 | + | UUUUGAAACAGGAAUAGAAAUUCA | 24 | downstream |
| | | (SEQ ID NO: 2569) | | |
| CEP290-1762 | + | UUUGAAACAGGAAUAGAAAUUCA | 23 | downstream |
| | | (SEQ ID NO: 2570) | | |
| CEP290-1763 | + | UUGAAACAGGAAUAGAAAUUCA | 22 | downstream |
| | | (SEQ ID NO: 2571) | | |
| CEP290-1764 | + | UGAAACAGGAAUAGAAAUUCA | 21 | downstream |
| | | (SEQ ID NO: 2572) | | |
| CEP290-1765 | − | UUUUCUUAAGCAUACUUUUUUUAA | 24 | downstream |
| | | (SEQ ID NO: 2573) | | |
| CEP290-1766 | − | UUUCUUAAGCAUACUUUUUUUAA | 23 | downstream |
| | | (SEQ ID NO: 2574) | | |
| CEP290-1767 | − | UUCUUAAGCAUACUUUUUUUAA | 22 | downstream |
| | | (SEQ ID NO: 2575) | | |
| CEP290-1768 | − | UCUUAAGCAUACUUUUUUUAA | 21 | downstream |
| | | (SEQ ID NO: 2576) | | |
| CEP290-1769 | − | UUAAGCAUACUUUUUUUAA | 19 | downstream |
| | | (SEQ ID NO: 2577) | | |
| CEP290-1770 | − | UAAGCAUACUUUUUUUAA | 18 | downstream |
| | | (SEQ ID NO: 2578) | | |
| CEP290-1771 | + | UCACUCCACUGCACUCCAGC | 20 | downstream |
| | | (SEQ ID NO: 2579) | | |
| CEP290-1772 | + | AGUUUUUAAGGCGGGGAGUCACA | 23 | downstream |
| | | (SEQ ID NO: 2580) | | |
| CEP290-1773 | − | AAACUGUCAAAAGCUACCGGUUAC | 24 | downstream |
| | | (SEQ ID NO: 2581) | | |
| CEP290-1774 | − | AACUGUCAAAAGCUACCGGUUAC | 23 | downstream |
| | | (SEQ ID NO: 2582) | | |
| CEP290-252 | + | ACUGUCAAAAGCUACCGGUUAC | 22 | downstream |
| | | (SEQ ID NO: 2583) | | |
| CEP290-1775 | + | AGUUCAUCUCUUGCUCUAGAUGAC | 24 | downstream |
| | | (SEQ ID NO: 2584) | | |
| CEP290-1776 | + | AUCUCUUGCUCUAGAUGAC | 19 | downstream |
| | | (SEQ ID NO: 2585) | | |
| CEP290-1777 | − | ACGAAAAUCAGAUUUCAUGU | 20 | downstream |
| | | (SEQ ID NO: 2586) | | |
| CEP290-1778 | − | AAUACAUGAGAGUGAUUAGUG | 21 | downstream |
| | | (SEQ ID NO: 2587) | | |
| CEP290-1779 | − | AUACAUGAGAGUGAUUAGUG | 20 | downstream |
| | | (SEQ ID NO: 831) | | |
| CEP290-1780 | − | ACAUGAGAGUGAUUAGUG | 18 | downstream |
| | | (SEQ ID NO: 2589) | | |
| CEP290-1781 | + | AUUAGCUUGAACUCUGUGCCAAA | 23 | downstream |
| | | (SEQ ID NO: 2590) | | |
| CEP290-1782 | + | AGCUUGAACUCUGUGCCAAA | 20 | downstream |
| | | (SEQ ID NO: 824) | | |
| CEP290-1783 | − | AUGUAGAUUGAGGUAGAAUCAAG | 23 | downstream |
| | | (SEQ ID NO: 2592) | | |
| CEP290-1784 | − | AGAUUGAGGUAGAAUCAAG | 19 | downstream |
| | | (SEQ ID NO: 2593) | | |
| CEP290-1785 | + | AUAAGAUGCAGAACUAGUGUAGA | 23 | downstream |
| | | (SEQ ID NO: 2594) | | |
| CEP290-1786 | + | AAGAUGCAGAACUAGUGUAGA | 21 | downstream |
| | | (SEQ ID NO: 2595) | | |
| CEP290-1787 | + | AGAUGCAGAACUAGUGUAGA | 20 | downstream |
| | | (SEQ ID NO: 821) | | |
| CEP290-1788 | + | AUGCAGAACUAGUGUAGA | 18 | downstream |
| | | (SEQ ID NO: 2597) | | |
| CEP290-1789 | − | AUAGAUGUAGAUUGAGGUAGAAUC | 24 | downstream |
| | | (SEQ ID NO: 2598) | | |
| CEP290-1790 | − | AGAUGUAGAUUGAGGUAGAAUC | 22 | downstream |
| | | (SEQ ID NO: 2599) | | |
| CEP290-1791 | − | AUGUAGAUUGAGGUAGAAUC | 20 | downstream |
| | | (SEQ ID NO: 2600) | | |
| CEP290-1792 | + | AGAAUGAUCAUUCUUGUGGCAGUA | 24 | downstream |
| | | (SEQ ID NO: 2601) | | |
| CEP290-1793 | + | AAUGAUCAUUCUUGUGGCAGUA | 22 | downstream |
| | | (SEQ ID NO: 2602) | | |
| CEP290-1794 | + | AUGAUCAUUCUUGUGGCAGUA | 21 | downstream |
| | | (SEQ ID NO: 2603) | | |
| CEP290-1795 | + | AUCAUUCUUGUGGCAGUA | 18 | downstream |
| | | (SEQ ID NO: 2604) | | |
| CEP290-1796 | + | AGAAUGAUCAUUCUUGUGGCAGU | 23 | downstream |
| | | (SEQ ID NO: 2605) | | |
| CEP290-1797 | + | AAUGAUCAUUCUUGUGGCAGU | 21 | downstream |
| | | (SEQ ID NO: 2606) | | |
| CEP290-1798 | + | AUGAUCAUUCUUGUGGCAGU | 20 | downstream |
| | | (SEQ ID NO: 837) | | |
| CEP290-1799 | − | AGAGGUAAAGGUUCAUGAGAC | 21 | downstream |
| | | (SEQ ID NO: 2608) | | |
| CEP290-1800 | − | AGGUAAAGGUUCAUGAGAC | 19 | downstream |
| | | (SEQ ID NO: 2609) | | |
| CEP290-1801 | + | AGCUUUUGACAGUUUUUAAG | 20 | downstream |
| | | (SEQ ID NO: 825) | | |
| CEP290-1802 | + | AGCUUUUGACAGUUUUUAAGGC | 22 | downstream |
| | | (SEQ ID NO: 2611) | | |
| CEP290-1803 | + | AGAAAUUCACUGAGCAAAACAAC | 23 | downstream |
| | | (SEQ ID NO: 2612) | | |
| CEP290-1804 | + | AAAUUCACUGAGCAAAACAAC | 21 | downstream |
| | | (SEQ ID NO: 2613) | | |
| CEP290-1805 | + | AAUUCACUGAGCAAAACAAC | 20 | downstream |
| | | (SEQ ID NO: 678) | | |
| CEP290-1806 | + | AUUCACUGAGCAAAACAAC | 19 | downstream |
| | | (SEQ ID NO: 2615) | | |
| CEP290-1807 | + | AGUAAGGAGGAUGUAAGA | 18 | downstream |
| | | (SEQ ID NO: 2616) | | |
| CEP290-1808 | + | AUCAAAAGACUUAUAUUCCAUUA | 23 | downstream |
| | | (SEQ ID NO: 2617) | | |
| CEP290-1809 | + | AAAAGACUUAUAUUCCAUUA | 20 | downstream |
| | | (SEQ ID NO: 685) | | |
| CEP290-1810 | + | AAAGACUUAUAUUCCAUUA | 19 | downstream |
| | | (SEQ ID NO: 2619) | | |
| CEP290-1811 | + | AAGACUUAUAUUCCAUUA | 18 | downstream |
| | | (SEQ ID NO: 2620) | | |
| CEP290-1812 | − | AGGAAAUUAUUGUUGCUUUUU | 21 | downstream |
| | | (SEQ ID NO: 2621) | | |
| CEP290-1813 | − | AAAUUAUUGUUGCUUUUU | 18 | downstream |
| | | (SEQ ID NO: 2622) | | |
| CEP290-1814 | − | AAAGAAAAACUUGAAAUUUGAUAG | 24 | downstream |
| | | (SEQ ID NO: 2623) | | |
| CEP290-1815 | − | AAGAAAAACUUGAAAUUUGAUAG | 23 | downstream |
| | | (SEQ ID NO: 2624) | | |
| CEP290-1816 | − | AGAAAAACUUGAAAUUUGAUAG | 22 | downstream |
| | | (SEQ ID NO: 2625) | | |
| CEP290-1817 | − | AAAAACUUGAAAUUUGAUAG | 20 | downstream |
| | | (SEQ ID NO: 2626) | | |
| CEP290-1818 | − | AAAACUUGAAAUUUGAUAG | 19 | downstream |
| | | (SEQ ID NO: 2627) | | |
| CEP290-1819 | − | AAACUUGAAAUUUGAUAG | 18 | downstream |
| | | (SEQ ID NO: 2628) | | |
| CEP290-1820 | − | AAGAAAAAAGAAAUAGAUGUAGA | 23 | downstream |
| | | (SEQ ID NO: 2629) | | |
| CEP290-1821 | − | AGAAAAAAGAAAUAGAUGUAGA | 22 | downstream |
| | | (SEQ ID NO: 2630) | | |
| CEP290-1822 | − | AAAAAAGAAAUAGAUGUAGA | 20 | downstream |
| | | (SEQ ID NO: 2631) | | |
| CEP290-1823 | − | AAAAAGAAAUAGAUGUAGA | 19 | downstream |
| | | (SEQ ID NO: 2632) | | |
| CEP290-1824 | − | AAAAGAAAUAGAUGUAGA | 18 | downstream |
| | | (SEQ ID NO: 2633) | | |
| CEP290-1825 | − | AGAGUCUCACUGUGUUGCCCAGG | 23 | downstream |
| | | (SEQ ID NO: 2634) | | |
| CEP290-1826 | − | AGUCUCACUGUGUUGCCCAGG | 21 | downstream |
| | | (SEQ ID NO: 2635) | | |
| CEP290-1827 | + | CAGUUUUUAAGGCGGGGAGUCACA | 24 | downstream |
| | | (SEQ ID NO: 2636) | | |
| CEP290-1828 | − | CUGUCAAAAGCUACCGGUUAC | 21 | downstream |
| | | (SEQ ID NO: 2637) | | |
| CEP290-1829 | + | CAUCUCUUGCUCUAGAUGAC | 20 | downstream |
| | | (SEQ ID NO: 853) | | |
| CEP290-1830 | − | CACGAAAAUCAGAUUUCAUGU | 21 | downstream |
| | | (SEQ ID NO: 2639) | | |
| CEP290-1831 | − | CGAAAAUCAGAUUUCAUGU | 19 | downstream |
| | | (SEQ ID NO: 2640) | | |
| CEP290-1832 | − | CUAAUACAUGAGAGUGAUUAGUG | 23 | downstream |
| | | (SEQ ID NO: 2641) | | |
| CEP290-1833 | + | CUUGAACUCUGUGCCAAA | 18 | downstream |
| | | (SEQ ID NO: 2642) | | |
| CEP290-1834 | + | CUCUAGAUGACAUGAGGUAAG | 21 | downstream |
| | | (SEQ ID NO: 2643) | | |
| CEP290-1835 | + | CUAGAUGACAUGAGGUAAG | 19 | downstream |
| | | (SEQ ID NO: 2644) | | |
| CEP290-1836 | + | CGGUAGCUUUUGACAGUUUUUAAG | 24 | downstream |
| | | (SEQ ID NO: 2645) | | |
| CEP290-1837 | + | CUUUUGACAGUUUUUAAG | 18 | downstream |
| | | (SEQ ID NO: 2646) | | |
| CEP290-1838 | + | CUUUUGACAGUUUUUAAGGC | 20 | downstream |
| | | (SEQ ID NO: 684) | | |
| CEP290-1839 | + | CAGUAAGGAGGAUGUAAGA | 19 | downstream |
| | | (SEQ ID NO: 2648) | | |
| CEP290-1840 | + | CAAAAGACUUAUAUUCCAUUA | 21 | downstream |
| | | (SEQ ID NO: 2649) | | |
| CEP290-1841 | − | CUUAGGAAAUUAUUGUUGCUUUUU | 24 | downstream |
| | | (SEQ ID NO: 2650) | | |
| CEP290-1842 | − | CUGUGUUGCCCAGGCUGGAGUGCA | 24 | downstream |
| | | (SEQ ID NO: 2651) | | |
| CEP290-1843 | − | CAGAGUCUCACUGUGUUGCCCAGG | 24 | downstream |
| | | (SEQ ID NO: 2652) | | |
| CEP290-1844 | − | CUCACUGUGUUGCCCAGG | 18 | downstream |
| | | (SEQ ID NO: 2653) | | |
| CEP290-1845 | + | GUUUUUAAGGCGGGGAGUCACA | 22 | downstream |
| | | (SEQ ID NO: 2654) | | |
| CEP290-1846 | − | GUCAAAAGCUACCGGUUAC | 19 | downstream |
| | | (SEQ ID NO: 2655) | | |
| CEP290-1847 | + | GUUCAUCUCUUGCUCUAGAUGAC | 23 | downstream |
| | | (SEQ ID NO: 2656) | | |
| CEP290-1848 | − | GGUCACGAAAAUCAGAUUUCAUGU | 24 | downstream |
| | | (SEQ ID NO: 2657) | | |
| CEP290-1849 | − | GUCACGAAAAUCAGAUUUCAUGU | 23 | downstream |
| | | (SEQ ID NO: 2658) | | |
| CEP290-1850 | − | GAAAAUCAGAUUUCAUGU | 18 | downstream |
| | | (SEQ ID NO: 2659) | | |
| CEP290-1851 | − | GCUAAUACAUGAGAGUGAUUAGUG | 24 | downstream |
| | | (SEQ ID NO: 2660) | | |
| CEP290-1852 | + | GCUUGAACUCUGUGCCAAA | 19 | downstream |
| | | (SEQ ID NO: 2661) | | |
| CEP290-1853 | + | GCUCUAGAUGACAUGAGGUAAG | 22 | downstream |
| | | (SEQ ID NO: 2662) | | |
| CEP290-1854 | − | GAUGUAGAUUGAGGUAGAAUCAAG | 24 | downstream |
| | | (SEQ ID NO: 2663) | | |
| CEP290-1855 | − | GUAGAUUGAGGUAGAAUCAAG | 21 | downstream |
| | | (SEQ ID NO: 2664) | | |
| CEP290-1856 | − | GAUUGAGGUAGAAUCAAG | 18 | downstream |
| | | (SEQ ID NO: 2665) | | |
| CEP290-1857 | + | GAUGCAGAACUAGUGUAGA | 19 | downstream |
| | | (SEQ ID NO: 2666) | | |
| CEP290-1858 | − | GAUGUAGAUUGAGGUAGAAUC | 21 | downstream |
| | | (SEQ ID NO: 2667) | | |
| CEP290-1859 | − | GUAGAUUGAGGUAGAAUC | 18 | downstream |
| | | (SEQ ID NO: 2668) | | |
| CEP290-1860 | + | GAAUGAUCAUUCUUGUGGCAGUA | 23 | downstream |
| | | (SEQ ID NO: 2669) | | |
| CEP290-1861 | + | GAUCAUUCUUGUGGCAGUA | 19 | downstream |
| | | (SEQ ID NO: 2670) | | |
| CEP290-1862 | + | GAAUGAUCAUUCUUGUGGCAGU | 22 | downstream |
| | | (SEQ ID NO: 2671) | | |
| CEP290-1863 | + | GAUCAUUCUUGUGGCAGU | 18 | downstream |
| | | (SEQ ID NO: 2672) | | |
| CEP290-1864 | − | GAGAGGUAAAGGUUCAUGAGAC | 22 | downstream |
| | | (SEQ ID NO: 2673) | | |
| CEP290-1865 | − | GAGGUAAAGGUUCAUGAGAC | 20 | downstream |
| | | (SEQ ID NO: 2674) | | |
| CEP290-1866 | − | GGUAAAGGUUCAUGAGAC | 18 | downstream |
| | | (SEQ ID NO: 2675) | | |
| CEP290-1867 | + | GGUAGCUUUUGACAGUUUUUAAG | 23 | downstream |
| | | (SEQ ID NO: 2676) | | |
| CEP290-1868 | + | GUAGCUUUUGACAGUUUUUAAG | 22 | downstream |
| | | (SEQ ID NO: 2677) | | |
| CEP290-1869 | + | GCUUUUGACAGUUUUUAAG | 19 | downstream |
| | | (SEQ ID NO: 2678) | | |
| CEP290-1870 | + | GUAGCUUUUGACAGUUUUUAAGGC | 24 | downstream |
| | | (SEQ ID NO: 2679) | | |
| CEP290-1871 | + | GCUUUUGACAGUUUUUAAGGC | 21 | downstream |
| | | (SEQ ID NO: 2680) | | |
| CEP290-1872 | + | GAAAUUCACUGAGCAAAACAAC | 22 | downstream |
| | | (SEQ ID NO: 2681) | | |
| CEP290-1873 | + | GUGGCAGUAAGGAGGAUGUAAGA | 23 | downstream |
| | | (SEQ ID NO: 2682) | | |
| CEP290-1874 | + | GGCAGUAAGGAGGAUGUAAGA | 21 | downstream |
| | | (SEQ ID NO: 2683) | | |
| CEP290-1875 | + | GCAGUAAGGAGGAUGUAAGA | 20 | downstream |
| | | (SEQ ID NO: 775) | | |
| CEP290-1876 | − | GGAAAUUAUUGUUGCUUUUU | 20 | downstream |
| | | (SEQ ID NO: 2685) | | |
| CEP290-1877 | − | GAAAUUAUUGUUGCUUUUU | 19 | downstream |
| | | (SEQ ID NO: 2686) | | |
| CEP290-1878 | − | GAAAAACUUGAAAUUUGAUAG | 21 | downstream |
| | | (SEQ ID NO: 2687) | | |
| CEP290-1879 | − | GAAGAAAAAAGAAAUAGAUGUAGA | 24 | downstream |
| | | (SEQ ID NO: 2688) | | |
| CEP290-1880 | − | GAAAAAAGAAAUAGAUGUAGA | 21 | downstream |
| | | (SEQ ID NO: 2689) | | |
| CEP290-1881 | − | GUGUUGCCCAGGCUGGAGUGCA | 22 | downstream |
| | | (SEQ ID NO: 2690) | | |
| CEP290-1882 | − | GUUGCCCAGGCUGGAGUGCA | 20 | downstream |
| | | (SEQ ID NO: 2691) | | |
| CEP290-1883 | − | GAGUCUCACUGUGUUGCCCAGG | 22 | downstream |
| | | (SEQ ID NO: 2692) | | |
| CEP290-1884 | − | GUCUCACUGUGUUGCCCAGG | 20 | downstream |
| | | (SEQ ID NO: 2693) | | |
| CEP290-1885 | + | UUUUUAAGGCGGGGAGUCACA | 21 | downstream |
| | | (SEQ ID NO: 2694) | | |
| CEP290-1886 | + | UUUUAAGGCGGGGAGUCACA | 20 | downstream |
| | | (SEQ ID NO: 672) | | |
| CEP290-1887 | + | UUUAAGGCGGGGAGUCACA | 19 | downstream |
| | | (SEQ ID NO: 2696) | | |
| CEP290-1888 | + | UUAAGGCGGGGAGUCACA | 18 | downstream |
| | | (SEQ ID NO: 2697) | | |
| CEP290-1889 | − | UGUCAAAAGCUACCGGUUAC | 20 | downstream |
| | | (SEQ ID NO: 757) | | |
| CEP290-1890 | − | UCAAAAGCUACCGGUUAC | 18 | downstream |
| | | (SEQ ID NO: 2699) | | |
| CEP290-1891 | + | UUCAUCUCUUGCUCUAGAUGAC | 22 | downstream |
| | | (SEQ ID NO: 2700) | | |
| CEP290-1892 | + | UCAUCUCUUGCUCUAGAUGAC | 21 | downstream |
| | | (SEQ ID NO: 2701) | | |
| CEP290-1893 | + | UCUCUUGCUCUAGAUGAC | 18 | downstream |
| | | (SEQ ID NO: 2702) | | |
| CEP290-1894 | − | UCACGAAAAUCAGAUUUCAUGU | 22 | downstream |
| | | (SEQ ID NO: 2703) | | |
| CEP290-1895 | − | UAAUACAUGAGAGUGAUUAGUG | 22 | downstream |
| | | (SEQ ID NO: 2704) | | |
| CEP290-1896 | − | UACAUGAGAGUGAUUAGUG | 19 | downstream |
| | | (SEQ ID NO: 2705) | | |
| CEP290-1897 | + | UAUUAGCUUGAACUCUGUGCCAAA | 24 | downstream |
| | | (SEQ ID NO: 2706) | | |
| CEP290-1898 | + | UUAGCUUGAACUCUGUGCCAAA | 22 | downstream |
| | | (SEQ ID NO: 2707) | | |
| CEP290-1899 | + | UAGCUUGAACUCUGUGCCAAA | 21 | downstream |
| | | (SEQ ID NO: 2708) | | |
| CEP290-1900 | + | UUGCUCUAGAUGACAUGAGGUAAG | 24 | downstream |
| | | (SEQ ID NO: 2709) | | |
| CEP290-1901 | + | UGCUCUAGAUGACAUGAGGUAAG | 23 | downstream |
| | | (SEQ ID NO: 2710) | | |
| CEP290-1902 | + | UCUAGAUGACAUGAGGUAAG | 20 | downstream |
| | | (SEQ ID NO: 888) | | |
| CEP290-1903 | + | UAGAUGACAUGAGGUAAG | 18 | downstream |
| | | (SEQ ID NO: 2712) | | |
| CEP290-1904 | − | UGUAGAUUGAGGUAGAAUCAAG | 22 | downstream |
| | | (SEQ ID NO: 2713) | | |
| CEP290-1905 | − | UAGAUUGAGGUAGAAUCAAG | 20 | downstream |
| | | (SEQ ID NO: 2714) | | |
| CEP290-1906 | + | UAUAAGAUGCAGAACUAGUGUAGA | 24 | downstream |
| | | (SEQ ID NO: 2715) | | |
| CEP290-1907 | + | UAAGAUGCAGAACUAGUGUAGA | 22 | downstream |
| | | (SEQ ID NO: 2716) | | |
| CEP290-1908 | − | UAGAUGUAGAUUGAGGUAGAAUC | 23 | downstream |
| | | (SEQ ID NO: 2717) | | |
| CEP290-1909 | − | UGUAGAUUGAGGUAGAAUC | 19 | downstream |
| | | (SEQ ID NO: 2718) | | |
| CEP290-1910 | + | UGAUCAUUCUUGUGGCAGUA | 20 | downstream |
| | | (SEQ ID NO: 688) | | |
| CEP290-1911 | + | UAGAAUGAUCAUUCUUGUGGCAGU | 24 | downstream |
| | | (SEQ ID NO: 2720) | | |
| CEP290-1912 | + | UGAUCAUUCUUGUGGCAGU | 19 | downstream |
| | | (SEQ ID NO: 2721) | | |
| CEP290-1913 | − | UUGAGAGGUAAAGGUUCAUGAGAC | 24 | downstream |
| | | (SEQ ID NO: 2722) | | |
| CEP290-1914 | − | UGAGAGGUAAAGGUUCAUGAGAC | 23 | downstream |
| | | (SEQ ID NO: 2723) | | |
| CEP290-1915 | + | UAGCUUUUGACAGUUUUUAAG | 21 | downstream |
| | | (SEQ ID NO: 2724) | | |
| CEP290-1916 | + | UAGCUUUUGACAGUUUUUAAGGC | 23 | downstream |
| | | (SEQ ID NO: 2725) | | |
| CEP290-1917 | + | UUUUGACAGUUUUUAAGGC | 19 | downstream |
| | | (SEQ ID NO: 2726) | | |
| CEP290-1918 | + | UUUGACAGUUUUUAAGGC | 18 | downstream |
| | | (SEQ ID NO: 2727) | | |
| CEP290-1919 | + | UAGAAAUUCACUGAGCAAAACAAC | 24 | downstream |
| | | (SEQ ID NO: 2728) | | |
| CEP290-1920 | + | UUCACUGAGCAAAACAAC | 18 | downstream |
| | | (SEQ ID NO: 2729) | | |
| CEP290-1921 | + | UGUGGCAGUAAGGAGGAUGUAAGA | 24 | downstream |
| | | (SEQ ID NO: 2730) | | |
| CEP290-1922 | + | UGGCAGUAAGGAGGAUGUAAGA | 22 | downstream |
| | | (SEQ ID NO: 2731) | | |
| CEP290-1923 | + | UAUCAAAAGACUUAUAUUCCAUUA | 24 | downstream |
| | | (SEQ ID NO: 2732) | | |
| CEP290-1924 | + | UCAAAAGACUUAUAUUCCAUUA | 22 | downstream |
| | | (SEQ ID NO: 2733) | | |
| CEP290-1925 | − | UUAGGAAAUUAUUGUUGCUUUUU | 23 | downstream |
| | | (SEQ ID NO: 2734) | | |
| CEP290-1926 | − | UAGGAAAUUAUUGUUGCUUUUU | 22 | downstream |
| | | (SEQ ID NO: 2735) | | |
| CEP290-1927 | − | UGUGUUGCCCAGGCUGGAGUGCA | 23 | downstream |
| | | (SEQ ID NO: 2736) | | |
| CEP290-1928 | − | UGUUGCCCAGGCUGGAGUGCA | 21 | downstream |
| | | (SEQ ID NO: 2737) | | |
| CEP290-1929 | − | UUGCCCAGGCUGGAGUGCA | 19 | downstream |
| | | (SEQ ID NO: 2738) | | |
| CEP290-1930 | − | UGCCCAGGCUGGAGUGCA | 18 | downstream |
| | | (SEQ ID NO: 2739) | | |
| CEP290-1931 | − | UCUCACUGUGUUGCCCAGG | 19 | downstream |
| | | (SEQ ID NO: 2740) | | |
| CEP290-13 | + | AUGAGAUACUCACAAUUACAAC | 22 | upstream |
| | | (SEQ ID NO: 1049) | | |
| CEP290-18 | + | GUAUGAGAUACUCACAAUUACAAC | 24 | upstream |
| | | (SEQ ID NO: 1051) | | |
| CEP290-14 | + | UAUGAGAUACUCACAAUUACAAC | 23 | upstream |
| | | (SEQ ID NO: 1053) | | |
| CEP290-19 | + | GGUAUGAGAUAUUCACAAUUACAA | 24 | upstream |
| | | (SEQ ID NO: 1057) | | |

[0923] Table 10A provides targeting domains for break-induced deletion of genomic sequence including the mutation at the LCA10 target position in the CEP290 gene selected according to the first tier parameters. The targeting domains are within 1000 bp upstream of an Alu repeat, within 40 bp upstream of mutation, or 1000 bp downstream of the mutation, have good orthogonality, and start with G. It is contemplated herein that the targeting domain hybridizes to the target domain through complementary base pairing. Any of the targeting domains in the table can be used with a N. meningitidis Cas9 molecule that generates a double stranded break (Cas9 nuclease) or a single-stranded break (Cas9 nickase).

TABLE 10A

| | | | | Position |
|---|---|---|---|---|
| | | | | relative |
| gRNA | DNA | Target | Site | to |
| Name | Strand | Targeting Domain | Length | mutation |
| CEP290- | + | GGCAAAAGCAGCAGAAAGC | 20 | upstream |
| 1932 | | A (SEQ ID NO: 591) | | |
| CEP290- | − | GUGGCUGAAUGACUUCU | 17 | upstream |
| 1933 | | (SEQ ID NO: 592) | | |
| CEP290- | − | GUUGUUCUGAGUAGCUU | 17 | upstream |
| 1934 | | (SEQ ID NO: 590) | | |
| CEP290- | − | GACUAGAGGUCACGAAA | 17 | downstream |
| 1935 | | (SEQ ID NO: 593) | | |
| CEP290- | − | GAGUUCAAGCUAAUACAUG | 20 | downstream |
| 1936 | | A (SEQ ID NO: 589) | | |

[0924] Table 10B provides targeting domains for break-induced deletion of genomic sequence including the mutation at the LCA10 target position in the CEP290 gene selected according to the second tier parameters. The targeting domains are within 1000 bp upstream of an Alu repeat, within 40 bp upstream of mutation, or 1000 bp downstream of the mutation, have good orthogonality, and do not start with G. It is contemplated herein that the targeting domain hybridizes to the target domain through complementary base pairing. Any of the targeting domains in the table can be used with a N. meningitidis Cas9 molecule that generates a double stranded break (Cas9 nuclease) or a single-stranded break (Cas9 nickase).

TABLE 10B

| | | | Target | Position |
|---|---|---|---|---|
| | DNA | | Site | relative to |
| gRNA Name | Strand | Targeting Domain | Length | mutation |
| CEP290-1937 | + | AAAAGCAGCAGAAAGCA | 17 | upstream |
| | | (SEQ ID NO: 1012) | | |
| CEP290-1938 | − | AACGUUGUUCUGAGUAGCUU | 20 | upstream |
| | | (SEQ ID NO: 1014) | | |
| CEP290-1939 | − | AAUAGAGGCUUAUGGAU | 17 | upstream |
| | | (SEQ ID NO: 1007) | | |
| CEP290-1940 | + | ACUUAAUGAGUGCUUCCCUC | 20 | upstream |
| | | (SEQ ID NO: 2748) | | |
| CEP290-1941 | − | AGAAAUAGAGGCUUAUGGA | 20 | upstream |
| | | U (SEQ ID NO: 1016) | | |
| CEP290-1942 | + | AGCAGAAAGCAAACUGA | 17 | upstream |
| | | (SEQ ID NO: 1011) | | |
| CEP290-1943 | + | AGCAGCAGAAAGCAAACUGA | 20 | upstream |
| | | (SEQ ID NO: 1018) | | |
| CEP290-1944 | + | AGGGUCUGGUCCAUAUU | 17 | upstream |
| | | (SEQ ID NO: 2752) | | |
| CEP290-1945 | − | AUAGUGGCUGAAUGACUUCU | 20 | upstream |
| | | (SEQ ID NO: 2753) | | |
| CEP290-1946 | + | AUGUCUGGUUAAAAGAG | 17 | upstream |
| | | (SEQ ID NO: 2754) | | |
| CEP290-1947 | + | CAAAGGGUCUGGUCCAUAUU | 20 | upstream |
| | | (SEQ ID NO: 2755) | | |
| CEP290-1948 | − | CAUCAGAAAUAGAGGCU | 17 | upstream |
| | | (SEQ ID NO: 1009) | | |
| CEP290-1949 | − | CCUCAUCAGAAAUAGAGGCU | 20 | upstream |
| | | (SEQ ID NO: 1017) | | |
| CEP290-1950 | − | CUGAGGACAGAACAAGC | 17 | upstream |
| | | (SEQ ID NO: 1008) | | |
| CEP290-1951 | − | CUGCUGCUUUUGCCAAAGAG | 20 | upstream |
| | | (SEQ ID NO: 725) | | |
| CEP290-1952 | − | CUGCUUUUGCCAAAGAG | 17 | upstream |
| | | (SEQ ID NO: 711) | | |
| CEP290-1953 | + | UAAUGAGUGCUUCCCUC | 17 | upstream |
| | | (SEQ ID NO: 2761) | | |
| CEP290-1954 | + | UAGAUGUCUGGUUAAAAGA | 20 | upstream |
| | | G (SEQ ID NO: 2762) | | |
| CEP290-1955 | − | UCAUUCUCCUUAGGUCACUU | 20 | upstream |
| | | (SEQ ID NO: 2763) | | |
| CEP290-1956 | − | UUACUGAGGACAGAACAAGC | 20 | upstream |
| | | (SEQ ID NO: 1013) | | |
| CEP290-1957 | − | UUCUCCUUAGGUCACUU | 17 | upstream |
| | | (SEQ ID NO: 2765) | | |
| CEP290-1958 | − | AAGAAAAAAGAAAUAGA | 17 | downstream |
| | | (SEQ ID NO: 2766) | | |
| CEP290-1959 | − | AGAUUGAGGUAGAAUCAAG | 20 | downstream |
| | | A (SEQ ID NO: 2767) | | |
| CEP290-1960 | + | AGUCACAUGGGAGUCACAGG | 20 | downstream |
| | | (SEQ ID NO: 1006) | | |
| CEP290-1961 | + | CAAAAAAAGAAUCCUCU | 17 | downstream |
| | | (SEQ ID NO: 2769) | | |
| CEP290-1962 | + | CAACAAAAAAAGAAUCCUCU | 20 | downstream |
| | | (SEQ ID NO: 2770) | | |
| CEP290-1963 | + | CACAUGGGAGUCACAGG | 17 | downstream |
| | | (SEQ ID NO: 1005) | | |
| CEP290-1964 | + | CAUUCUUCACACAUGAA | 17 | downstream |
| | | (SEQ ID NO: 2772) | | |
| CEP290-1965 | − | UAGAAGAAAAAAGAAAUAG | 20 | downstream |
| | | A (SEQ ID NO: 2773) | | |
| CEP290-1966 | − | UGAGACUAGAGGUCACGAAA | 20 | downstream |
| | | (SEQ ID NO: 2774) | | |
| CEP290-1967 | − | UUCAAGCUAAUACAUGA | 17 | downstream |
| | | (SEQ ID NO: 1004) | | |
| CEP290-1968 | + | UUCCAUUCUUCACACAUGAA | 20 | downstream |
| | | (SEQ ID NO: 2776) | | |
| CEP290-1969 | − | UUGAGGUAGAAUCAAGA | 17 | downstream |
| | | (SEQ ID NO: 2777) | | |

[0925] Table 11 provides targeting domains for break-induced deletion of genomic sequence including the mutation at the LCA10 target position in the CEP290 gene by dual targeting (e.g., dual double strand cleavage). Exemplary gRNA pairs to be used with S. aureus Cas9 are shown in Table 11, e.g., CEP290-323 can be combined with CEP290-11, CEP290-323 can be combined with CEP290-64, CEP290-490 can be combined with CEP290-496, CEP290-490 can be combined with CEP290-502, CEP290-490 can be combined with CEP290-504, CEP290-492 can be combined with CEP290-502, or CEP290-492 can be combined with CEP290-504.

TABLE 11

| Upstream gRNA (SEQ ID NO) | | Downstream gRNA (SEQ ID NO) | |
|---|---|---|---|
| CEP290-323 | GTTCTGTCCTCAGTAAAAGGTA | CEP290-11 | GACACTGCCAATAGGG |
| | (SEQ ID NO: 389) | | ATAGGT |
| | (corresponding RNA | | (SEQ ID NO: 387) |
| | sequence in | | (corresponding RNA |
| | SEQ ID NO: 530) | | sequence in SEQ ID NO: |
| | | | 1047) |
| CEP290-323 | GTTCTGTCCTCAGTAAAAGGTA | CEP290-64 | GTCAAAAGCTACCGGT |
| | (SEQ ID NO: 389) | | TACCTG (SEQ ID NO: |
| | | | 388) |
| | | | (corresponding RNA |
| | | | sequence in SEQ ID NO: |
| | | | 558) |
| CEP290-490 | GAATAGTTTGTTCTGGGTAC | CEP290-496 | GATGCAGAACTAGTGT |
| | (SEQ ID NO: 390) | | AGAC (SEQ ID NO: 392) |
| | (corresponding | | (corresponding RNA |
| | RNA sequence in | | sequence in SEQ ID NO: |
| | SEQ ID NO: 468) | | 460) |
| CEP290-490 | GAATAGTTTGTTCTGGGTAC | CEP290-502 | GTCACATGGGAGTCAC |
| | (SEQ ID NO: 390) | | AGGG (SEQ ID NO: 393) |
| | | | (corresponding RNA |
| | | | sequence in SEQ ID NO: |
| | | | 586) |
| CEP290-490 | GAATAGTTTGTTCTGGGTAC | CEP290-504 | GAGTATCTCCTGTTTGG |
| | (SEQ ID NO: 390) | | CA |
| | | | (SEQ ID NO: 394) |
| | | | (corresponding RNA |
| | | | sequence in SEQ ID NO: |
| | | | 568) |
| CEP290-492 | GAGAAAGGGATGGGCACTTA | CEP290-502 | GTCACATGGGAGTCAC |
| | (SEQ ID NO: 391) | | AGGG |
| | (corresponding | | (SEQ ID NO: 393) |
| | RNA sequence in | | |
| | SEQ ID NO: 538) | | |
| CEP290-492 | GAGAAAGGGATGGGCACTTA | CEP290-504 | GAGTATCTCCTGTTTGG |
| | (SEQ ID NO: 391) | | CA |
| | | | (SEQ ID NO: 394) |

### IV. RNA-Guided Nucleases

[0926] RNA-guided nucleases according to the present disclosure include, without limitation, naturally-occurring Class 2 CRISPR nucleases such as Cas9, and Cpf1, as well as other nucleases derived or obtained therefrom. In functional terms, RNA-guided nucleases are defined as those nucleases that: (a) interact with (e.g., complex with) a gRNA; and (b) together with the gRNA, associate with, and optionally cleave or modify, a target region of a DNA that includes (i) a sequence complementary to the targeting domain of the gRNA and, optionally, (ii) an additional sequence referred to as a “protospacer adjacent motif,” or “PAM,” which is described in greater detail below. As the following examples will illustrate, RNA-guided nucleases can be defined, in broad terms, by their PAM specificity and cleavage activity, even though variations may exist between individual RNA-guided nucleases that share the same PAM specificity or cleavage activity. Skilled artisans will appreciate that some aspects of the present disclosure relate to systems, methods and compositions that can be implemented using any suitable RNA-guided nuclease having a certain PAM specificity and/or cleavage activity. For this reason, unless otherwise specified, the term RNA-guided nuclease should be understood as a generic term, and not limited to any particular type (e.g., Cas9 vs. Cpf1), species (e.g., S. pyogenes vs. S. aureus) or variation (e.g., full-length vs. truncated or split; naturally-occurring PAM specificity vs. engineered PAM specificity).

[0927] Turning to the PAM sequence, this structure takes its name from its sequential relationship to the “protospacer” sequence that is complementary to gRNA targeting domains (or “spacers”). Together with protospacer sequences, PAM sequences define target regions or sequences for specific RNA-guided nuclease/gRNA combinations.

[0928] Various RNA-guided nucleases may require different sequential relationships between PAMs and protospacers. In general, Cas9s recognize PAM sequences that are 5′ of the protospacer as visualized relative to the top or complementary strand.

[0929] In addition to recognizing specific sequential orientations of PAMs and protospacers, RNA-guided nucleases generally recognize specific PAM sequences. S. aureus Cas9, for example, recognizes a PAM sequence of NNGRRT, wherein the N sequences are immediately 3′ of the region recognized by the gRNA targeting domain. S. pyogenes Cas9 recognizes NGG PAM sequences. It should also be noted that engineered RNA-guided nucleases can have PAM specificities that differ from the PAM specificities of similar nucleases (such as the naturally occurring variant from which an RNA-guided nuclease is derived, or the naturally occurring variant having the greatest amino acid sequence homology to an engineered RNA-guided nuclease). Modified Cas9s that recognize alternate PAM sequences are described below.

[0930] RNA-guided nucleases are also characterized by their DNA cleavage activity: naturally-occurring RNA-guided nucleases typically form DSBs in target nucleic acids, but engineered variants have been produced that generate only SSBs (discussed above; see also Ran 2013, incorporated by reference herein), or that do not cut at all.

### Cas9 Molecules

[0931] Crystal structures have been determined for S. pyogenes Cas9 (Jinek 2014), and for S. aureus Cas9 in complex with a unimolecular gRNA and a target DNA (Nishimasu 2014; Anders 2014; and Nishimasu 2015).

[0932] Cas9 molecules of a variety of species can be used in the methods and compositions described herein. While the S. pyogenes, S. aureus, and S. thermophilus Cas9 molecules are the subject of much of the disclosure herein, Cas9 molecules of, derived from, or based on the Cas9 proteins of other species listed herein can be used as well. In other words, while the much of the description herein uses S. pyogenes and S. thermophilus Cas9 molecules Cas9 molecules from the other species can replace them. Such species include: Acidovorax avenae, Actinobacillus pleuropneumoniae, Actinobacillus succinogenes, Actinobacillus suis, Actinomyces sp., Cycliphilusdenitrificans, Aminomonas paucivorans, Bacillus cereus, Bacillus smithii, Bacillus thuringiensis, Bacteroides sp., Blastopirellula marina, Bradyrhizobium sp., Brevibacillus laterosporus, Campylobacter coli, Campylobacter jejuni, Campylobacter lari, Candidatus puniceispirillum, Clostridium cellulolyticum, Clostridium perfringens, Corynebacterium accolens, Corynebacterium diphtheria, Corynebacterium matruchotii, Dinoroseobacter shibae, Eubacterium dolichum, Gammaproteobacterium, Gluconacetobacter diazotrophicus, Haemophilus parainfluenzae, Haemophilus sputorum, Helicobacter canadensis, Helicobacter cinaedi, Helicobacter mustelae, Ilyobacter polytropus, Kingella kingae, Lactobacillus crispatus, Listeria ivanovii, Listeria monocytogenes, Listeriaceae bacterium, Methylocystis sp., Methylosinus trichosporium, Mobiluncus mulieris, Neisseria bacilliformis, Neisseria cinerea, Neisseria flavescens, Neisseria lactamica, Neisseria meningitidis, Neisseria sp., Neisseria wadsworthii, Nitrosomonas sp., Parvibaculum lavamentivorans, Pasteurella multocida, Phascolarctobacterium succinatutens, Ralstonia syzygii, Rhodopseudomonas palustris, Rhodovulum sp., Simonsiella muelleri, Sphingomonas sp., Sporolactobacillus vineae, Staphylococcus aureus, Staphylococcus lugdunensis, Streptococcus sp., Subdoligranulum sp., Tistrella mobilis, Treponema sp., or Verminephrobacter eiseniae.

[0933] A Cas9 molecule, or Cas9 polypeptide, as that term is used herein, refers to a molecule or polypeptide that can interact with a guide RNA (gRNA) molecule and, in concert with the gRNA molecule, homes or localizes to a site which comprises a target domain and PAM sequence. Cas9 molecule and Cas9 polypeptide, as those terms are used herein, refer to naturally occurring Cas9 molecules and to engineered, altered, or modified Cas9 molecules or Cas9 polypeptides that differ, e.g., by at least one amino acid residue, from a reference sequence, e.g., the most similar naturally occurring Cas9 molecule or a sequence of Table 12.

### Cas9 Domains

[0934] Crystal structures have been determined for two different naturally occurring bacterial Cas9 molecules (Jinek 2014) and for S. pyogenes Cas9 with a guide RNA (e.g., a synthetic fusion of crRNA and tracrRNA) (Nishimasu 2014; Anders 2014).

[0935] A naturally occurring Cas9 molecule comprises two lobes: a recognition (REC) lobe and a nuclease (NUC) lobe; each of which further comprises domains described herein. FIGS. 8A-8B provide a schematic of the organization of important Cas9 domains in the primary structure. The domain nomenclature and the numbering of the amino acid residues encompassed by each domain used throughout this disclosure is as described in Nishimasu 2014. The numbering of the amino acid residues is with reference to Cas9 from S. pyogenes.

[0936] The REC lobe comprises the arginine-rich bridge helix (BH), the REC1 domain, and the REC2 domain. The REC lobe does not share structural similarity with other known proteins, indicating that it is a Cas9-specific functional domain. The BH domain is a long a helix and arginine rich region and comprises amino acids 60-93 of the sequence of S. pyogenes Cas9. The REC1 domain is important for recognition of the repeat:anti-repeat duplex, e.g., of a gRNA or a tracrRNA, and is therefore critical for Cas9 activity by recognizing the target sequence. The REC1 domain comprises two REC1 motifs at amino acids 94 to 179 and 308 to 717 of the sequence of S. pyogenes Cas9. These two REC1 domains, though separated by the REC2 domain in the linear primary structure, assemble in the tertiary structure to form the REC1 domain. The REC2 domain, or parts thereof, may also play a role in the recognition of the repeat:anti-repeat duplex. The REC2 domain comprises amino acids 180-307 of the sequence of S. pyogenes Cas9.

[0937] The NUC lobe comprises the RuvC domain (also referred to herein as RuvC-like domain), the HNH domain (also referred to herein as HNH-like domain), and the PAM-interacting (PI) domain. The RuvC domain shares structural similarity to retroviral integrase superfamily members and cleaves a single strand, e.g., the non-complementary strand of the target nucleic acid molecule. The RuvC domain is assembled from the three split RuvC motifs (RuvC I, RuvCII, and RuvCIII, which are often commonly referred to in the art as RuvCI domain, or N-terminal RuvC domain, RuvCII domain, and RuvCIII domain) at amino acids 1-59, 718-769, and 909-1098, respectively, of the sequence of S. pyogenes Cas9. Similar to the REC1 domain, the three RuvC motifs are linearly separated by other domains in the primary structure, however in the tertiary structure, the three RuvC motifs assemble and form the RuvC domain. The HNH domain shares structural similarity with HNH endonucleases, and cleaves a single strand, e.g., the complementary strand of the target nucleic acid molecule. The HNH domain lies between the RuvC II-III motifs and comprises amino acids 775-908 of the sequence of S. pyogenes Cas9. The PI domain interacts with the PAM of the target nucleic acid molecule, and comprises amino acids 1099-1368 of the sequence of S. pyogenes Cas9.

### RuvC-Like Domain and HNH-Like Domain

[0938] In an embodiment, a Cas9 molecule or Cas9 polypeptide comprises an HNH-like domain and a RuvC-like domain. In an embodiment, cleavage activity is dependent on a RuvC-like domain and an HNH-like domain. A Cas9 molecule or Cas9 polypeptide, e.g., an eaCas9 molecule or eaCas9 polypeptide, can comprise one or more of the following domains: a RuvC-like domain and an HNH-like domain. In an embodiment, a Cas9 molecule or Cas9 polypeptide is an eaCas9 molecule or eaCas9 polypeptide and the eaCas9 molecule or eaCas9 polypeptide comprises a RuvC-like domain, e.g., a RuvC-like domain described below, and/or an HNH-like domain, e.g., an HNH-like domain described below.

### RuvC-Like Domains

[0939] In an embodiment, a RuvC-like domain cleaves, a single strand, e.g., the non-complementary strand of the target nucleic acid molecule. The Cas9 molecule or Cas9 polypeptide can include more than one RuvC-like domain (e.g., one, two, three or more RuvC-like domains). In an embodiment, a RuvC-like domain is at least 5, 6, 7, 8 amino acids in length but not more than 20, 19, 18, 17, 16 or 15 amino acids in length. In an embodiment, the Cas9 molecule or Cas9 polypeptide comprises an N-terminal RuvC-like domain of about 10 to 20 amino acids, e.g., about 15 amino acids in length.

### N-Terminal RuvC-Like Domains

[0940] Some naturally occurring Cas9 molecules comprise more than one RuvC-like domain with cleavage being dependent on the N-terminal RuvC-like domain. Accordingly, Cas9 molecules or Cas9 polypeptide can comprise an N-terminal RuvC-like domain. Exemplary N-terminal RuvC-like domains are described below.

[0941] In an embodiment, an eaCas9 molecule or eaCas9 polypeptide comprises an N-terminal RuvC-like domain comprising an amino acid sequence of formula I:

(SEQ ID NO: 8)
D-X1-G-X2-X3-X4-X5-G-X6-X7-X8-X9,

[0942] wherein,
[0943] X1 is selected from I, V, M, L and T (e.g., selected from I, V, and L);
[0944] X2 is selected from T, I, V, S, N, Y, E and L (e.g., selected from T, V, and I);
[0945] X3 is selected from N, S, G, A, D, T, R, M and F (e.g., A or N);
[0946] X4 is selected from S, Y, N and F (e.g., S);
[0947] X5 is selected from V, I, L, C, T and F (e.g., selected from V, I and L);
[0948] X6 is selected from W, F, V, Y, S and L (e.g., W);
[0949] X7 is selected from A, S, C, V and G (e.g., selected from A and S);
[0950] X8 is selected from V, I, L, A, M and H (e.g., selected from V, I, M and L); and
[0951] X9 is selected from any amino acid or is absent, designated by Δ (e.g., selected from T, V, I, L, Δ, F, S, A, Y, M and R, or, e.g., selected from T, V, I, L and Δ).

[0952] In an embodiment, the N-terminal RuvC-like domain differs from a sequence of SEQ ID NO: 8, by as many as 1 but no more than 2, 3, 4, or 5 residues.

[0953] In embodiment, the N-terminal RuvC-like domain is cleavage competent.

[0954] In embodiment, the N-terminal RuvC-like domain is cleavage incompetent.

[0955] In an embodiment, a eaCas9 molecule or eaCas9 polypeptide comprises an N-terminal RuvC-like domain comprising an amino acid sequence of formula II:

(SEQ ID NO: 9)
D-X1-G-X2-X3-S-X5-G-X6-X7-X8-X9,,

[0956] wherein
[0957] X1 is selected from I, V, M, L and T (e.g., selected from I, V, and L);
[0958] X2 is selected from T, I, V, S, N, Y, E and L (e.g., selected from T, V, and I);
[0959] X3 is selected from N, S, G, A, D, T, R, M and F (e.g., A or N);
[0960] X5 is selected from V, I, L, C, T and F (e.g., selected from V, I and L);
[0961] X6 is selected from W, F, V, Y, S and L (e.g., W);
[0962] X7 is selected from A, S, C, V and G (e.g., selected from A and S);
[0963] X8 is selected from V, I, L, A, M and H (e.g., selected from V, I, M and L); and
[0964] X9 is selected from any amino acid or is absent (e.g., selected from T, V, I, L, Δ, F, S, A, Y, M and R or selected from e.g., T, V, I, L and Δ).

[0965] In an embodiment, the N-terminal RuvC-like domain differs from a sequence of SEQ ID NO:9 by as many as 1 but no more than 2, 3, 4, or 5 residues.

[0966] In an embodiment, the N-terminal RuvC-like domain comprises an amino acid sequence of formula III:

(SEQ ID NO: 10)
D-I-G-X2-X3-S-V-G-W-A-X8-X9,

[0967] wherein
[0968] X2 is selected from T, I, V, S, N, Y, E and L (e.g., selected from T, V, and I);
[0969] X3 is selected from N, S, G, A, D, T, R, M and F (e.g., A or N);
[0970] X8 is selected from V, I, L, A, M and H (e.g., selected from V, I, M and L); and
[0971] X9 is selected from any amino acid or is absent (e.g., selected from T, V, I, L, Δ, F, S, A, Y, M and R or selected from e.g., T, V, I, L and Δ).

[0972] In an embodiment, the N-terminal RuvC-like domain differs from a sequence of SEQ ID NO: 10 by as many as 1 but no more than, 2, 3, 4, or 5 residues.

[0973] In an embodiment, the N-terminal RuvC-like domain comprises an amino acid sequence of formula III:

(SEQ ID NO: 11)
D-I-G-T-N-S-V-G-W-A-V-X,

[0974] wherein
[0975] X is a non-polar alkyl amino acid or a hydroxyl amino acid, e.g., X is selected from V, I, L and T (e.g., the eaCas9 molecule can comprise an N-terminal RuvC-like domain shown in FIGS. 2A-2G (is depicted as Y)).

[0976] In an embodiment, the N-terminal RuvC-like domain differs from a sequence of SEQ ID NO: 11 by as many as 1 but no more than, 2, 3, 4, or 5 residues.

[0977] In an embodiment, the N-terminal RuvC-like domain differs from a sequence of an N-terminal RuvC like domain disclosed herein, e.g., in FIGS. 3A-3B or FIGS. 7A-7B, as many as 1 but no more than 2, 3, 4, or 5 residues. In an embodiment, 1, 2, or all 3 of the highly conserved residues identified in FIGS. 3A-3B or FIGS. 7A-7B are present.

[0978] In an embodiment, the N-terminal RuvC-like domain differs from a sequence of an N-terminal RuvC-like domain disclosed herein, e.g., in FIGS. 4A-4B or FIGS. 7A-7B, as many as 1 but no more than 2, 3, 4, or 5 residues. In an embodiment, 1, 2, 3 or all 4 of the highly conserved residues identified in FIGS. 4A-4B or FIGS. 7A-7B are present.

### Additional RuvC-Like Domains

[0979] In addition to the N-terminal RuvC-like domain, the Cas9 molecule or Cas9 polypeptide, e.g., an eaCas9 molecule or eaCas9 polypeptide, can comprise one or more additional RuvC-like domains. In an embodiment, the Cas9 molecule or Cas9 polypeptide can comprise two additional RuvC-like domains. Preferably, the additional RuvC-like domain is at least 5 amino acids in length and, e.g., less than 15 amino acids in length, e.g., 5 to 10 amino acids in length, e.g., 8 amino acids in length.

[0980] An additional RuvC-like domain can comprise an amino acid sequence:

(SEQ ID NO: 12)
I-X1-X2-E-X3-A-R-E,

wherein
[0981] X1 is V or H,
[0982] X2 is I, L or V (e.g., I or V); and
[0983] X3 is M or T.

[0984] In an embodiment, the additional RuvC-like domain comprises the amino acid sequence:

(SEQ ID NO: 13)
I-V-X2-E-M-A-R-E,

wherein
[0985] X2 is I, L or V (e.g., I or V) (e.g., the eaCas9 molecule or eaCas9 polypeptide can comprise an additional RuvC-like domain shown in FIG. 2A-2G or FIGS. 7A-7B (depicted as B))

[0986] An additional RuvC-like domain can comprise an amino acid sequence:

(SEQ ID NO: 14)
H-H-A-X1-D-A-X2-X3,

wherein
[0987] X1 is H or L;
[0988] X2 is R or V; and
[0989] X3 is E or V.

[0990] In an embodiment, the additional RuvC-like domain comprises the amino acid sequence:

(SEQ ID NO: 15)
H-H-A-H-D-A-Y-L.

[0991] In an embodiment, the additional RuvC-like domain differs from a sequence of SEQ ID NOs: 13, 15, 12 or 14 by as many as 1 but no more than 2, 3, 4, or 5 residues.

[0992] In some embodiments, the sequence flanking the N-terminal RuvC-like domain is a sequences of formula V:

(SEQ ID NO: 16)
K-X1′-Y-X2′-X3′-X4′-Z-T-D-X9′-Y,.

[0993] wherein
[0994] X1′ is selected from K and P,
[0995] X2′ is selected from V, L, I, and F (e.g., V, I and L);
[0996] X3′ is selected from G, A and S (e.g., G),
[0997] X4′ is selected from L, I, V and F (e.g., L);
[0998] X9′ is selected from D, E, N and Q; and
[0999] Z is an N-terminal RuvC-like domain, e.g., as described above.

### HNH-Like Domains

[1000] In an embodiment, an HNH-like domain cleaves a single stranded complementary domain, e.g., a complementary strand of a double stranded nucleic acid molecule. In an embodiment, an HNH-like domain is at least 15, 20, 25 amino acids in length but not more than 40, 35 or 30 amino acids in length, e.g., 20 to 35 amino acids in length, e.g., 25 to 30 amino acids in length. Exemplary HNH-like domains are described below.

[1001] In an embodiment, an eaCas9 molecule or eaCas9 polypeptide comprises an HNH-like domain having an amino acid sequence of formula VI:

(SEQ ID NO: 17)
X1-X2-X3-H-X4-X5-P-X6-X7-X8-X9-X10-X11-X12-X13-
X14-X15-N-X16-X17-X18-X19-X20-X21-X22-X23-N,

wherein
[1002] X1 is selected from D, E, Q and N (e.g., D and E);
[1003] X2 is selected from L, I, R, Q, V, M and K;
[1004] X3 is selected from D and E;
[1005] X4 is selected from I, V, T, A and L (e.g., A, I and V);
[1006] X5 is selected from V, Y, I, L, F and W (e.g., V, I and L);
[1007] X6 is selected from Q, H, R, K, Y, I, L, F and W;
[1008] X7 is selected from S, A, D, T and K (e.g., S and A);
[1009] X8 is selected from F, L, V, K, Y, M, I, R, A, E, D and Q (e.g., F);
[1010] X9 is selected from L, R, T, I, V, S, C, Y, K, F and G;
[1011] X10 is selected from K, Q, Y, T, F, L, W, M, A, E, G, and S;
[1012] X11 is selected from D, S, N, R, L and T (e.g., D);
[1013] X12 is selected from D, N and S;
[1014] X13 is selected from S, A, T, G and R (e.g., S);
[1015] X14 is selected from I, L, F, S, R, Y, Q, W, D, K and H (e.g., I, L and F);
[1016] X15 is selected from D, S, I, N, E, A, H, F, L, Q, M, G, Y and V;
[1017] X16 is selected from K, L, R, M, T and F (e.g., L, R and K);
[1018] X17 is selected from V, L, I, A and T;
[1019] X18 is selected from L, I, V and A (e.g., L and I);
[1020] X19 is selected from T, V, C, E, S and A (e.g., T and V);
[1021] X20 is selected from R, F, T, W, E, L, N, C, K, V, S, Q, I, Y, H and A;
[1022] X21 is selected from S, P, R, K, N, A, H, Q, G and L;
[1023] X22 is selected from D, G, T, N, S, K, A, I, E, L, Q, R and Y; and
[1024] X23 is selected from K, V, A, E, Y, I, C, L, S, T, G, K, M, D and F.

[1025] In an embodiment, a HNH-like domain differs from a sequence of SEQ ID NO: 16 by at least one but no more than, 2, 3, 4, or 5 residues.

[1026] In an embodiment, the HNH-like domain is cleavage competent.

[1027] In an embodiment, the HNH-like domain is cleavage incompetent.

[1028] In an embodiment, an eaCas9 molecule or eaCas9 polypeptide comprises an HNH-like domain comprising an amino acid sequence of formula VII:

(SEQ ID NO: 18)
X1-X2-X3-H-X4-X5-P-X6-S-X8-X9-X10-D-D-S-X14-X15-
N-K-V-L-X19-X20-X21-X22-X23-N,

[1029] wherein
[1030] X1 is selected from D and E;
[1031] X2 is selected from L, I, R, Q, V, M and K;
[1032] X3 is selected from D and E;
[1033] X4 is selected from I, V, T, A and L (e.g., A, I and V);
[1034] X5 is selected from V, Y, I, L, F and W (e.g., V, I and L);
[1035] X6 is selected from Q, H, R, K, Y, I, L, F and W;
[1036] X8 is selected from F, L, V, K, Y, M, I, R, A, E, D and Q (e.g., F);
[1037] X9 is selected from L, R, T, I, V, S, C, Y, K, F and G;
[1038] X10 is selected from K, Q, Y, T, F, L, W, M, A, E, G, and S;
[1039] X14 is selected from I, L, F, S, R, Y, Q, W, D, K and H (e.g., I, L and F);
[1040] X15 is selected from D, S, I, N, E, A, H, F, L, Q, M, G, Y and V;
[1041] X19 is selected from T, V, C, E, S and A (e.g., T and V);
[1042] X20 is selected from R, F, T, W, E, L, N, C, K, V, S, Q, I, Y, H and A;
[1043] X21 is selected from S, P, R, K, N, A, H, Q, G and L;
[1044] X22 is selected from D, G, T, N, S, K, A, I, E, L, Q, R and Y; and
[1045] X23 is selected from K, V, A, E, Y, I, C, L, S, T, G, K, M, D and F.

[1046] In an embodiment, the HNH-like domain differs from a sequence of SEQ ID NO: 15 by 1, 2, 3, 4, or 5 residues.

[1047] In an embodiment, an eaCas9 molecule or eaCas9 polypeptide comprises an HNH-like domain comprising an amino acid sequence of formula VII:

(SEQ ID NO: 19)
X1-V-X3-H-I-V-P-X6-S-X8-X9-X10-D-D-S-X14-X15-N-K-
V-L-T-X20-X21-X22-X23-N,

[1048] wherein
[1049] X1 is selected from D and E;
[1050] X3 is selected from D and E;
[1051] X6 is selected from Q, H, R, K, Y, I, L and W;
[1052] X8 is selected from F, L, V, K, Y, M, I, R, A, E, D and Q (e.g., F);
[1053] X9 is selected from L, R, T, I, V, S, C, Y, K, F and G;
[1054] X10 is selected from K, Q, Y, T, F, L, W, M, A, E, G, and S;
[1055] X14 is selected from I, L, F, S, R, Y, Q, W, D, K and H (e.g., I, L and F);
[1056] X15 is selected from D, S, I, N, E, A, H, F, L, Q, M, G, Y and V;
[1057] X20 is selected from R, F, T, W, E, L, N, C, K, V, S, Q, I, Y, H and A;
[1058] X21 is selected from S, P, R, K, N, A, H, Q, G and L;
[1059] X22 is selected from D, G, T, N, S, K, A, I, E, L, Q, R and Y; and
[1060] X23 is selected from K, V, A, E, Y, I, C, L, S, T, G, K, M, D and F.

[1061] In an embodiment, the HNH-like domain differs from a sequence of SEQ ID NO:GG by 1, 2, 3, 4, or 5 residues.

[1062] In an embodiment, an eaCas9 molecule or eaCas9 polypeptide comprises an HNH-like domain having an amino acid sequence of formula VIII:

(SEQ ID NO: 20)
D-X2-D-H-I-X5-P-Q-X7-F-X9-X10-D-X12-S-I-D-N-X16-
V-L-X19-X20-S-X22-X23-N,

[1063] wherein
[1064] X2 is selected from I and V;
[1065] X5 is selected from I and V;
[1066] X7 is selected from A and S;
[1067] X9 is selected from I and L;
[1068] X10 is selected from K and T;
[1069] X12 is selected from D and N;
[1070] X16 is selected from R, K and L; X19 is selected from T and V;
[1071] X20 is selected from S and R;
[1072] X22 is selected from K, D and A; and
[1073] X23 is selected from E, K, G and N (e.g., the eaCas9 molecule or eaCas9 polypeptide can comprise an HNH-like domain as described herein).

[1074] In an embodiment, the HNH-like domain differs from a sequence of SEQ ID NO: 19 by as many as 1 but no more than 2, 3, 4, or 5 residues.

[1075] In an embodiment, an eaCas9 molecule or eaCas9 polypeptide comprises the amino acid sequence of formula IX:

(SEQ ID NO: 21)
L-Y-Y-L-Q-N-G-X1′-D-M-Y-X2′-X3′-X4′-X5′-L-D-I-
X6′-X7′-L-S-X8′-Y-Z-N-R-X9′-K-X10′-D-X11′-V-P,

[1076] wherein
[1077] X1′ is selected from K and R;
[1078] X2′ is selected from V and T;
[1079] X3′ is selected from G and D;
[1080] X4′ is selected from E, Q and D;
[1081] X5′ is selected from E and D;
[1082] X6′ is selected from D, N and H;
[1083] X7′ is selected from Y, R and N;
[1084] X8′ is selected from Q, D and N; X9′ is selected from G and E;
[1085] X10′ is selected from S and G;
[1086] X11′ is selected from D and N; and
[1087] Z is an HNH-like domain, e.g., as described above.

[1088] In an embodiment, the eaCas9 molecule or eaCas9 polypeptide comprises an amino acid sequence that differs from a sequence of SEQ ID NO: 21 by as many as 1 but no more than 2, 3, 4, or 5 residues.

[1089] In an embodiment, the HNH-like domain differs from a sequence of an HNH-like domain disclosed herein, e.g., in FIGS. 5A-5C or FIGS. 7A-7B, as many as 1 but no more than 2, 3, 4, or 5 residues. In an embodiment, 1 or both of the highly conserved residues identified in FIGS. 5A-5C or FIGS. 7A-7B are present.

[1090] In an embodiment, the HNH-like domain differs from a sequence of an HNH-like domain disclosed herein, e.g., in FIGS. 6A-6B or FIGS. 7A-7B, as many as 1 but no more than 2, 3, 4, or 5 residues. In an embodiment, 1, 2, all 3 of the highly conserved residues identified in FIGS. 6A-6B or FIGS. 7A-7B are present.

### Cas9 Activities

### Nuclease and Helicase Activities

[1091] In an embodiment, the Cas9 molecule or Cas9 polypeptide is capable of cleaving a target nucleic acid molecule. Typically wild type Cas9 molecules cleave both strands of a target nucleic acid molecule. Cas9 molecules and Cas9 polypeptides can be engineered to alter nuclease cleavage (or other properties), e.g., to provide a Cas9 molecule or Cas9 polypeptide which is a nickase, or which lacks the ability to cleave target nucleic acid. A Cas9 molecule or Cas9 polypeptide that is capable of cleaving a target nucleic acid molecule is referred to herein as an eaCas9 molecule or eaCas9 polypeptide.

[1092] In an embodiment, an eaCas9 molecule or eaCas9 polypeptide comprises one or more of the following activities:
[1093] a nickase activity, i.e., the ability to cleave a single strand, e.g., the non-complementary strand or the complementary strand, of a nucleic acid molecule;
[1094] a double stranded nuclease activity, i.e., the ability to cleave both strands of a double stranded nucleic acid and create a double stranded break, which in an embodiment is the presence of two nickase activities;
[1095] an endonuclease activity;
[1096] an exonuclease activity; and
[1097] a helicase activity, i.e., the ability to unwind the helical structure of a double stranded nucleic acid.

[1098] In an embodiment, an enzymatically active or eaCas9 molecule or eaCas9 polypeptide cleaves both strands and results in a double stranded break. In an embodiment, an eaCas9 molecule cleaves only one strand, e.g., the strand to which the gRNA hybridizes to, or the strand complementary to the strand the gRNA hybridizes with. In an embodiment, an eaCas9 molecule or eaCas9 polypeptide comprises cleavage activity associated with an HNH-like domain. In an embodiment, an eaCas9 molecule or eaCas9 polypeptide comprises cleavage activity associated with an N-terminal RuvC-like domain. In an embodiment, an eaCas9 molecule or eaCas9 polypeptide comprises cleavage activity associated with an HNH-like domain and cleavage activity associated with an N-terminal RuvC-like domain. In an embodiment, an eaCas9 molecule or eaCas9 polypeptide comprises an active, or cleavage competent, HNH-like domain and an inactive, or cleavage incompetent, N-terminal RuvC-like domain. In an embodiment, an eaCas9 molecule or eaCas9 polypeptide comprises an inactive, or cleavage incompetent, HNH-like domain and an active, or cleavage competent, N-terminal RuvC-like domain.

[1099] Some Cas9 molecules or Cas9 polypeptides have the ability to interact with a gRNA molecule, and in conjunction with the gRNA molecule localize to a core target domain, but are incapable of cleaving the target nucleic acid, or incapable of cleaving at efficient rates. Cas9 molecules having no, or no substantial, cleavage activity are referred to herein as an eiCas9 molecule or eiCas9 polypeptide. For example, an eiCas9 molecule or eiCas9 polypeptide can lack cleavage activity or have substantially less, e.g., less than 20, 10, 5, 1 or 0.1% of the cleavage activity of a reference Cas9 molecule or eiCas9 polypeptide, as measured by an assay described herein.

### Targeting and PAMs

[1100] RNA guided nucleases, such as Cas9 molecules or Cas9 polypeptides, generally, interact with a guide RNA (gRNA) molecule and, in concert with the gRNA molecule, localize to a site which comprises a target domain and a PAM sequence.

[1101] In an embodiment, the ability of an eaCas9 molecule or eaCas9 polypeptide to interact with and cleave a target nucleic acid is PAM sequence dependent. A PAM sequence is a sequence in the target nucleic acid. In an embodiment, cleavage of the target nucleic acid occurs upstream from the PAM sequence. EaCas9 molecules from different bacterial species can recognize different sequence motifs (e.g., PAM sequences). In an embodiment, an eaCas9 molecule of S. pyogenes recognizes the sequence motif NGG, NAG, NGA and directs cleavage of a target nucleic acid sequence 1 to 10, e.g., 3 to 5, base pairs upstream from that sequence. See, e.g., Mali 2013. In an embodiment, an eaCas9 molecule of S. thermophilus recognizes the sequence motif NGGNG and NNAGAAW (W=A or T) and directs cleavage of a core target nucleic acid sequence 1 to 10, e.g., 3 to 5, base pairs upstream from these sequences. See, e.g., Horvath 2010 and Deveau 2008. In an embodiment, an eaCas9 molecule of S. mutans recognizes the sequence motif NGG and/or NAAR (R=A or G) and directs cleavage of a core target nucleic acid sequence 1 to 10, e.g., 3 to 5 base pairs, upstream from this sequence. See, e.g., Deveau 2008. In an embodiment, an eaCas9 molecule of S. aureus recognizes the sequence motif NNGRR (R=A or G) and directs cleavage of a target nucleic acid sequence 1 to 10, e.g., 3 to 5, base pairs upstream from that sequence. In an embodiment, an eaCas9 molecule of S. aureus recognizes the sequence motif NNGRRN (R=A or G) and directs cleavage of a target nucleic acid sequence 1 to 10, e.g., 3 to 5, base pairs upstream from that sequence. In an embodiment, an eaCas9 molecule of S. aureus recognizes the sequence motif NNGRRT (R=A or G) and directs cleavage of a target nucleic acid sequence 1 to 10, e.g., 3 to 5, base pairs upstream from that sequence. In an embodiment, an eaCas9 molecule of S. aureus recognizes the sequence motif NNGRRV (R=A or G, V=A, G or C) and directs cleavage of a target nucleic acid sequence 1 to 10, e.g., 3 to 5, base pairs upstream from that sequence. In an embodiment, an eaCas9 molecule of Neisseria meningitidis recognizes the sequence motif NNNNGATT or NNNGCTT and directs cleavage of a target nucleic acid sequence 1 to 10, e.g., 3 to 5, base pairs upstream from that sequence. See, e.g., Hou 2013. The ability of a Cas9 molecule to recognize a PAM sequence can be determined, e.g., using a transformation assay described in Jinek 2012. In the aforementioned embodiments, N can be any nucleotide residue, e.g., any of A, G, C or T.

[1102] As is discussed herein, Cas9 molecules can be engineered to alter the PAM specificity of the Cas9 molecule.

[1103] Exemplary naturally occurring Cas9 molecules are described in Chylinski 2013. Such Cas9 molecules include Cas9 molecules of a cluster 1 bacterial family, cluster 2 bacterial family, cluster 3 bacterial family, cluster 4 bacterial family, cluster 5 bacterial family, cluster 6 bacterial family, a cluster 7 bacterial family, a cluster 8 bacterial family, a cluster 9 bacterial family, a cluster 10 bacterial family, a cluster 11 bacterial family, a cluster 12 bacterial family, a cluster 13 bacterial family, a cluster 14 bacterial family, a cluster 15 bacterial family, a cluster 16 bacterial family, a cluster 17 bacterial family, a cluster 18 bacterial family, a cluster 19 bacterial family, a cluster 20 bacterial family, a cluster 21 bacterial family, a cluster 22 bacterial family, a cluster 23 bacterial family, a cluster 24 bacterial family, a cluster 25 bacterial family, a cluster 26 bacterial family, a cluster 27 bacterial family, a cluster 28 bacterial family, a cluster 29 bacterial family, a cluster 30 bacterial family, a cluster 31 bacterial family, a cluster 32 bacterial family, a cluster 33 bacterial family, a cluster 34 bacterial family, a cluster 35 bacterial family, a cluster 36 bacterial family, a cluster 37 bacterial family, a cluster 38 bacterial family, a cluster 39 bacterial family, a cluster 40 bacterial family, a cluster 41 bacterial family, a cluster 42 bacterial family, a cluster 43 bacterial family, a cluster 44 bacterial family, a cluster 45 bacterial family, a cluster 46 bacterial family, a cluster 47 bacterial family, a cluster 48 bacterial family, a cluster 49 bacterial family, a cluster 50 bacterial family, a cluster 51 bacterial family, a cluster 52 bacterial family, a cluster 53 bacterial family, a cluster 54 bacterial family, a cluster 55 bacterial family, a cluster 56 bacterial family, a cluster 57 bacterial family, a cluster 58 bacterial family, a cluster 59 bacterial family, a cluster 60 bacterial family, a cluster 61 bacterial family, a cluster 62 bacterial family, a cluster 63 bacterial family, a cluster 64 bacterial family, a cluster 65 bacterial family, a cluster 66 bacterial family, a cluster 67 bacterial family, a cluster 68 bacterial family, a cluster 69 bacterial family, a cluster 70 bacterial family, a cluster 71 bacterial family, a cluster 72 bacterial family, a cluster 73 bacterial family, a cluster 74 bacterial family, a cluster 75 bacterial family, a cluster 76 bacterial family, a cluster 77 bacterial family, or a cluster 78 bacterial family.

[1104] Exemplary naturally occurring Cas9 molecules include a Cas9 molecule of a cluster 1 bacterial family. Examples include a Cas9 molecule of: S. pyogenes (e.g., strain SF370, MGAS10270, MGAS10750, MGAS2096, MGAS315, MGAS5005, MGAS6180, MGAS9429, NZ131 and SSI-1), S. thermophilus (e.g., strain LMD-9), S. pseudoporcinus (e.g., strain SPIN 20026), S. mutans (e.g., strain UA159, NN2025), S. macacae (e.g., strain NCTC11558), S. gallolyticus (e.g., strain UCN34, ATCC BAA-2069), S. equines (e.g., strain ATCC 9812, MGCS 124), S. dysdalactiae (e.g., strain GGS 124), S. bovis (e.g., strain ATCC 700338), S. anginosus (e.g., strain F0211), S. agalactiae (e.g., strain NEM316, A909), Listeria monocytogenes (e.g., strain F6854), Listeria innocua (L. innocua, e.g., strain Clip11262), Enterococcus italicus (e.g., strain DSM 15952), or Enterococcus faecium (e.g., strain 1,231,408). Another exemplary Cas9 molecule is a Cas9 molecule of Neisseria meningitidis (Hou 2013).

[1105] In an embodiment, a Cas9 molecule or Cas9 polypeptide, e.g., an eaCas9 molecule or eaCas9 polypeptide, comprises an amino acid sequence:
[1106] having 60%, 65%, 70%, 75%, 80%, 85%, 90%, 95%, 96%, 97%, 98% or 99% homology with;
[1107] differs at no more than, 2, 5, 10, 15, 20, 30, or 40% of the amino acid residues when compared with;
[1108] differs by at least 1, 2, 5, 10 or 20 amino acids but by no more than 100, 80, 70, 60, 50, 40 or 30 amino acids from; or
[1109] is identical to any Cas9 molecule sequence described herein, or a naturally occurring Cas9 molecule sequence, e.g., a Cas9 molecule from a species listed herein or described in Chylinski 2013; Hou 2013; SEQ ID NOs: 1-4. In an embodiment, the Cas9 molecule or Cas9 polypeptide comprises one or more of the following activities: a nickase activity; a double stranded cleavage activity (e.g., an endonuclease and/or exonuclease activity); a helicase activity; or the ability, together with a gRNA molecule, to home to a target nucleic acid.

[1110] In an embodiment, a Cas9 molecule or Cas9 polypeptide comprises the amino acid sequence of the consensus sequence of FIGS. 2A-2G, wherein “*” indicates any amino acid found in the corresponding position in the amino acid sequence of a Cas9 molecule of S. pyogenes, S. thermophilus, S. mutans and L. innocua, and “-” indicates any amino acid. In an embodiment, a Cas9 molecule or Cas9 polypeptide differs from the sequence of the consensus sequence disclosed in FIGS. 2A-2G by at least 1, but no more than 2, 3, 4, 5, 6, 7, 8, 9, or 10 amino acid residues. In an embodiment, a Cas9 molecule or Cas9 polypeptide comprises the amino acid sequence of SEQ ID NO: 7 of FIGS. 7A-7B, wherein “*” indicates any amino acid found in the corresponding position in the amino acid sequence of a Cas9 molecule of S. pyogenes, or N. meningitidis, “-” indicates any amino acid, and “-” indicates any amino acid or absent. In an embodiment, a Cas9 molecule or Cas9 polypeptide differs from the sequence of SEQ ID NOs: 6 or 7 disclosed in FIGS. 7A-7B by at least 1, but no more than 2, 3, 4, 5, 6, 7, 8, 9, or 10 amino acid residues.

[1111] A comparison of the sequence of a number of Cas9 molecules indicate that certain regions are conserved. These are identified below as:
[1112] region 1 (residues 1 to 180, or in the case of region 1′ residues 120 to 180)
[1113] region 2 (residues 360 to 480);
[1114] region 3 (residues 660 to 720);
[1115] region 4 (residues 817 to 900); and
[1116] region 5 (residues 900 to 960);

[1117] In an embodiment, a Cas9 molecule or Cas9 polypeptide comprises regions 1-5, together with sufficient additional Cas9 molecule sequence to provide a biologically active molecule, e.g., a Cas9 molecule having at least one activity described herein. In an embodiment, each of regions 1-6, independently, have, 50%, 60%, 70%, or 80% homology with the corresponding residues of a Cas9 molecule or Cas9 polypeptide described herein, e.g., a sequence from FIGS. 2A-2G or from FIGS. 7A-7B.

[1118] In an embodiment, a Cas9 molecule or Cas9 polypeptide, e.g., an eaCas9 molecule or eaCas9 polypeptide, comprises an amino acid sequence referred to as region 1:
[1119] having 50%, 60%, 70%, 80%, 85%, 90%, 95%, 96%, 97%, 98% or 99% homology with amino acids 1-180 (the numbering is according to the motif sequence in FIGS. 2A-2G; 52% of residues in the four Cas9 sequences in FIGS. 2A-2G are conserved) of the amino acid sequence of Cas9 of S. pyogenes;
[1120] differs by at least 1, 2, 5, 10 or 20 amino acids but by no more than 90, 80, 70, 60, 50, 40 or 30 amino acids from amino acids 1-180 of the amino acid sequence of Cas9 of S. pyogenes, S. thermophilus, S. mutans or L. innocua; or
[1121] is identical to 1-180 of the amino acid sequence of Cas9 of S. pyogenes, S. thermophilus, S. mutans or L. innocua.

[1122] In an embodiment, a Cas9 molecule or Cas9 polypeptide, e.g., an eaCas9 molecule or eaCas9 polypeptide, comprises an amino acid sequence referred to as region 1′:
[1123] having 55%, 60%, 65%, 70%, 75%, 80%, 85%, 90%, 95%, 96%, 97%, 98% or 99% homology with amino acids 120-180 (55% of residues in the four Cas9 sequences in FIGS. 2A-2G are conserved) of the amino acid sequence of Cas9 of S. pyogenes, S. thermophilus, S. mutans or L. innocua;
[1124] differs by at least 1, 2, or 5 amino acids but by no more than 35, 30, 25, 20 or 10 amino acids from amino acids 120-180 of the amino acid sequence of Cas9 of S. pyogenes, S. thermophilus, S. mutans or L. innocua; or
[1125] is identical to 120-180 of the amino acid sequence of Cas9 of S. pyogenes, S. thermophilus, S. mutans or L. innocua.

[1126] In an embodiment, a Cas9 molecule or Cas9 polypeptide, e.g., an eaCas9 molecule or eaCas9 polypeptide, comprises an amino acid sequence referred to as region 2:
[1127] having 50%, 55%, 60%, 65%, 70%, 75%, 80%, 85%, 90%, 95%, 96%, 97%, 98% or 99% homology with amino acids 360-480 (52% of residues in the four Cas9 sequences in FIGS. 2A-2G are conserved) of the amino acid sequence of Cas9 of S. pyogenes, S. thermophilus, S. mutans or L. innocua;
[1128] differs by at least 1, 2, or 5 amino acids but by no more than 35, 30, 25, 20 or 10 amino acids from amino acids 360-480 of the amino acid sequence of Cas9 of S. pyogenes, S. thermophilus, S. mutans or L. innocua; or
[1129] is identical to 360-480 of the amino acid sequence of Cas9 of S. pyogenes, S. thermophilus, S. mutans or L. innocua.

[1130] In an embodiment, a Cas9 molecule or Cas9 polypeptide, e.g., an eaCas9 molecule or eaCas9 polypeptide, comprises an amino acid sequence referred to as region 3:
[1131] having 55%, 60%, 65%, 70%, 75%, 80%, 85%, 90%, 95%, 96%, 97%, 98%, or 99% homology with amino acids 660-720 (56% of residues in the four Cas9 sequences in FIGS. 2A-2G are conserved) of the amino acid sequence of Cas9 of S. pyogenes, S. thermophilus, S. mutans or L. innocua;
[1132] differs by at least 1, 2, or 5 amino acids but by no more than 35, 30, 25, 20 or 10 amino acids from amino acids 660-720 of the amino acid sequence of Cas9 of S. pyogenes, S. thermophilus, S. mutans or L. innocua; or
[1133] is identical to 660-720 of the amino acid sequence of Cas9 of S. pyogenes, S. thermophilus, S. mutans or L. innocua.

[1134] In an embodiment, a Cas9 molecule or Cas9 polypeptide, e.g., an eaCas9 molecule or eaCas9 polypeptide, comprises an amino acid sequence referred to as region 4:
[1135] having 50%, 55%, 60%, 65%, 70%, 75%, 80%, 85%, 90%, 95%, 96%, 97%, 98%, or 99% homology with amino acids 817-900 (55% of residues in the four Cas9 sequences in FIGS. 2A-2G are conserved) of the amino acid sequence of Cas9 of S. pyogenes, S. thermophilus, S. mutans or L. innocua;
[1136] differs by at least 1, 2, or 5 amino acids but by no more than 35, 30, 25, 20 or 10 amino acids from amino acids 817-900 of the amino acid sequence of Cas9 of S. pyogenes, S. thermophilus, S. mutans or L. innocua; or
[1137] is identical to 817-900 of the amino acid sequence of Cas9 of S. pyogenes, S. thermophilus, S. mutans or L. innocua.

[1138] In an embodiment, a Cas9 molecule or Cas9 polypeptide, e.g., an eaCas9 molecule or eaCas9 polypeptide, comprises an amino acid sequence referred to as region 5:
[1139] having 50%, 55%, 60%, 65%, 70%, 75%, 80%, 85%, 90%, 95%, 96%, 97%, 98%, or 99% homology with amino acids 900-960 (60% of residues in the four Cas9 sequences in FIGS. 2A-2G are conserved) of the amino acid sequence of Cas9 of S. pyogenes, S. thermophilus, S. mutans or L. innocua;
[1140] differs by at least 1, 2, or 5 amino acids but by no more than 35, 30, 25, 20 or 10 amino acids from amino acids 900-960 of the amino acid sequence of Cas9 of S. pyogenes, S. thermophilus, S. mutans or L. innocua; or
[1141] is identical to 900-960 of the amino acid sequence of Cas9 of S. pyogenes, S. thermophilus, S. mutans or L. innocua.

### Modifications of RNA-Guided Nucleases

[1142] The RNA-guided nucleases described above have activities and properties that are useful in a variety of applications, but the skilled artisan will appreciate that RNA-guided nucleases may also be modified in certain instances, to alter cleavage activity, PAM specificity, or other structural or functional features.

[1143] Turning first to modifications that alter cleavage activity, mutations that reduce or eliminate the activity of domains within the NUC lobe have been described above. As discussed in more detail below, exemplary mutations that may be made in the RuvC domains, in the Cas9 HNH domain, or in the Cpf1 Nuc domain are described in Ran and Yamano, as well as in Cotta-Ramusino. In general, mutations that reduce or eliminate activity in one of the two nuclease domains result in RNA-guided nucleases with nickase activity, but it should be noted that the type of nickase activity varies depending on which domain is inactivated. As one example, inactivation of a RuvC domain of a Cas9 will result in a nickase that cleaves the complementary strand, while inactivation of a Cas9 HNH domain results in a nickase that cleaves the non-complementary strand.

[1144] Modifications of PAM specificity relative to naturally occurring Cas9 reference molecules has been described for both S. pyogenes (Kleinstiver 2015a) and S. aureus (Kleinstiver 2015b). Modifications that improve the targeting fidelity of Cas9 have also been described (Kleinstiver 2016). Each of these references is incorporated by reference herein.

[1145] RNA-guided nucleases have been split into two or more parts (see, e.g., Zetsche 2015; Fine 2015; both incorporated by reference).

[1146] RNA-guided nucleases are, in some cases, size-optimized or truncated, for example via one or more deletions that reduce the size of the nuclease while still retaining gRNA association, target and PAM recognition, and cleavage activities. In certain embodiments, RNA guided nucleases are bound, covalently or non-covalently, to another polypeptide, nucleotide, or other structure, optionally by means of a linker. RNA-guided nucleases also optionally include a tag, such as a nuclear localization signal to facilitate movement of RNA-guided nuclease protein into the nucleus.

### Engineered or Altered Cas9 Molecules and Cas9 Polypeptides

[1147] Cas9 molecules and Cas9 polypeptides described herein, e.g., naturally occurring Cas9 molecules, can possess any of a number of properties, including: nickase activity, nuclease activity (e.g., endonuclease and/or exonuclease activity); helicase activity; the ability to associate functionally with a gRNA molecule; and the ability to target (or localize to) a site on a nucleic acid (e.g., PAM recognition and specificity). In an embodiment, a Cas9 molecule or Cas9 polypeptide can include all or a subset of these properties. In typical embodiments, a Cas9 molecule or Cas9 polypeptide has the ability to interact with a gRNA molecule and, in concert with the gRNA molecule, localize to a site in a nucleic acid. Other activities, e.g., PAM specificity, cleavage activity, or helicase activity can vary more widely in Cas9 molecules and Cas9 polypeptides.

[1148] Cas9 molecules include engineered Cas9 molecules and engineered Cas9 polypeptides (engineered, as used in this context, means merely that the Cas9 molecule or Cas9 polypeptide differs from a reference sequences, and implies no process or origin limitation). An engineered Cas9 molecule or Cas9 polypeptide can comprise altered enzymatic properties, e.g., altered nuclease activity, (as compared with a naturally occurring or other reference Cas9 molecule) or altered helicase activity. As discussed herein, an engineered Cas9 molecule or Cas9 polypeptide can have nickase activity (as opposed to double strand nuclease activity). In an embodiment an engineered Cas9 molecule or Cas9 polypeptide can have an alteration that alters its size, e.g., a deletion of amino acid sequence that reduces its size, e.g., without significant effect on one or more, or any Cas9 activity. In an embodiment, an engineered Cas9 molecule or Cas9 polypeptide can comprise an alteration that affects PAM recognition. E.g., an engineered Cas9 molecule can be altered to recognize a PAM sequence other than that recognized by the endogenous wild-type PI domain. In an embodiment, a Cas9 molecule or Cas9 polypeptide can differ in sequence from a naturally occurring Cas9 molecule but not have significant alteration in one or more Cas9 activities.

[1149] Cas9 molecules or Cas9 polypeptides with desired properties can be made in a number of ways, e.g., by alteration of a parental, e.g., naturally occurring, Cas9 molecules or Cas9 polypeptides, to provide an altered Cas9 molecule or Cas9 polypeptide having a desired property. For example, one or more mutations or differences relative to a parental Cas9 molecule, e.g., a naturally occurring or engineered Cas9 molecule, can be introduced. Such mutations and differences comprise: substitutions (e.g., conservative substitutions or substitutions of non-essential amino acids); insertions; or deletions. In an embodiment, a Cas9 molecule or Cas9 polypeptide can comprises one or more mutations or differences, e.g., at least 1, 2, 3, 4, 5, 10, 15, 20, 30, 40 or 50 mutations, but less than 200, 100, or 80 mutations relative to a reference, e.g., a parental, Cas9 molecule.

[1150] In an embodiment, a mutation or mutations do not have a substantial effect on a Cas9 activity, e.g. a Cas9 activity described herein. In an embodiment, a mutation or mutations have a substantial effect on a Cas9 activity, e.g. a Cas9 activity described herein.

### Non-Cleaving and Modified-Cleavage Cas9 Molecules and Cas9 Polypeptides

[1151] In an embodiment, a Cas9 molecule or Cas9 polypeptide comprises a cleavage property that differs from naturally occurring Cas9 molecules, e.g., that differs from the naturally occurring Cas9 molecule having the closest homology. For example, a Cas9 molecule or Cas9 polypeptide can differ from naturally occurring Cas9 molecules, e.g., a Cas9 molecule of S. pyogenes, as follows: its ability to modulate, e.g., decreased or increased, cleavage of a double stranded nucleic acid (endonuclease and/or exonuclease activity), e.g., as compared to a naturally occurring Cas9 molecule (e.g., a Cas9 molecule of S. pyogenes); its ability to modulate, e.g., decreased or increased, cleavage of a single strand of a nucleic acid, e.g., a non-complementary strand of a nucleic acid molecule or a complementary strand of a nucleic acid molecule (nickase activity), e.g., as compared to a naturally occurring Cas9 molecule (e.g., a Cas9 molecule of S. pyogenes); or the ability to cleave a nucleic acid molecule, e.g., a double stranded or single stranded nucleic acid molecule, can be eliminated.

Modified Cleavage eaCas9 Molecules and eaCas9 Polypeptides

[1152] In an embodiment, an eaCas9 molecule or eaCas9 polypeptide comprises one or more of the following activities: cleavage activity associated with an N-terminal RuvC-like domain; cleavage activity associated with an HNH-like domain; cleavage activity associated with an HNH-like domain and cleavage activity associated with an N-terminal RuvC-like domain.

[1153] In an embodiment, an eaCas9 molecule or eaCas9 polypeptide comprises an active, or cleavage competent, HNH-like domain (e.g., an HNH-like domain described herein, e.g., SEQ ID NO: 17, SEQ ID NO: 18, SEQ ID NO: 19, SEQ ID NO: 20, or SEQ ID NO: 21) and an inactive, or cleavage incompetent, N-terminal RuvC-like domain. An exemplary inactive, or cleavage incompetent N-terminal RuvC-like domain can have a mutation of an aspartic acid in an N-terminal RuvC-like domain, e.g., an aspartic acid at position 9 of the consensus sequence disclosed in FIGS. 2A-2G or an aspartic acid at position 10 of SEQ ID NO: 7, e.g., can be substituted with an alanine. In an embodiment, the eaCas9 molecule or eaCas9 polypeptide differs from wild type in the N-terminal RuvC-like domain and does not cleave the target nucleic acid, or cleaves with significantly less efficiency, e.g., less than 20, 10, 5, 1 or 0.1% of the cleavage activity of a reference Cas9 molecule, e.g., as measured by an assay described herein. The reference Cas9 molecule can by a naturally occurring unmodified Cas9 molecule, e.g., a naturally occurring Cas9 molecule such as a Cas9 molecule of S. pyogenes, or S. thermophilus. In an embodiment, the reference Cas9 molecule is the naturally occurring Cas9 molecule having the closest sequence identity or homology.

[1154] In an embodiment, an eaCas9 molecule or eaCas9 polypeptide comprises an inactive, or cleavage incompetent, HNH domain and an active, or cleavage competent, N-terminal RuvC-like domain (e.g., an N-terminal RuvC-like domain described herein, e.g., SEQ ID NO: 8, SEQ ID NO: 9, SEQ ID NO: 10, SEQ ID NO: 11, SEQ ID NO: 12, SEQ ID NO: 13, SEQ ID NO: 14, SEQ ID NO: 15, or SEQ ID NO: 16). Exemplary inactive, or cleavage incompetent HNH-like domains can have a mutation at one or more of: a histidine in an HNH-like domain, e.g., a histidine shown at position 856 of FIGS. 2A-2G, e.g., can be substituted with an alanine; and one or more asparagines in an HNH-like domain, e.g., an asparagine shown at position 870 of FIGS. 2A-2G and/or at position 879 of FIGS. 2A-2G, e.g., can be substituted with an alanine. In an embodiment, the eaCas9 differs from wild type in the HNH-like domain and does not cleave the target nucleic acid, or cleaves with significantly less efficiency, e.g., less than 20, 10, 5, 1 or 0.1% of the cleavage activity of a reference Cas9 molecule, e.g., as measured by an assay described herein. The reference Cas9 molecule can by a naturally occurring unmodified Cas9 molecule, e.g., a naturally occurring Cas9 molecule such as a Cas9 molecule of S. pyogenes, or S. thermophilus. In an embodiment, the reference Cas9 molecule is the naturally occurring Cas9 molecule having the closest sequence identity or homology.

### Alterations in the Ability to Cleave One or Both Strands of a Target Nucleic Acid

[1155] In an embodiment, exemplary Cas9 activities comprise one or more of PAM specificity, cleavage activity, and helicase activity. A mutation(s) can be present, e.g., in one or more RuvC-like domain, e.g., an N-terminal RuvC-like domain; an HNH-like domain; a region outside the RuvC-like domains and the HNH-like domain. In some embodiments, a mutation(s) is present in a RuvC-like domain, e.g., an N-terminal RuvC-like domain. In some embodiments, a mutation(s) is present in an HNH-like domain. In some embodiments, mutations are present in both a RuvC-like domain, e.g., an N-terminal RuvC-like domain, and an HNH-like domain.

[1156] Exemplary mutations that may be made in the RuvC domain or HNH domain with reference to the S. pyogenes sequence include: D10A, E762A, H840A, N854A, N863A and/or D986A.

[1157] In an embodiment, a Cas9 molecule or Cas9 polypeptide is an eiCas9 molecule or eiCas9 polypeptide comprising one or more differences in a RuvC domain and/or in an HNH domain as compared to a reference Cas9 molecule, and the eiCas9 molecule or eiCas9 polypeptide does not cleave a nucleic acid, or cleaves with significantly less efficiency than does wildtype, e.g., when compared with wild type in a cleavage assay, e.g., as described herein, cuts with less than 50, 25, 10, or 1% of a reference Cas9 molecule, as measured by an assay described herein.

[1158] Whether or not a particular sequence, e.g., a substitution, may affect one or more activity, such as targeting activity, cleavage activity, etc., can be evaluated or predicted, e.g., by evaluating whether the mutation is conservative or by the method described in Section V. In an embodiment, a “non-essential” amino acid residue, as used in the context of a Cas9 molecule, is a residue that can be altered from the wild-type sequence of a Cas9 molecule, e.g., a naturally occurring Cas9 molecule, e.g., an eaCas9 molecule, without abolishing or more preferably, without substantially altering a Cas9 activity (e.g., cleavage activity), whereas changing an “essential” amino acid residue results in a substantial loss of activity (e.g., cleavage activity).

[1159] In an embodiment, a Cas9 molecule or Cas9 polypeptide comprises a cleavage property that differs from naturally occurring Cas9 molecules, e.g., that differs from the naturally occurring Cas9 molecule having the closest homology. For example, a Cas9 molecule or Cas9 polypeptide can differ from naturally occurring Cas9 molecules, e.g., a Cas9 molecule of S aureus, S. pyogenes, or C. jejuni as follows: its ability to modulate, e.g., decreased or increased, cleavage of a double stranded break (endonuclease and/or exonuclease activity), e.g., as compared to a naturally occurring Cas9 molecule (e.g., a Cas9 molecule of S aureus, S. pyogenes, or C. jejuni); its ability to modulate, e.g., decreased or increased, cleavage of a single strand of a nucleic acid, e.g., a non-complimentary strand of a nucleic acid molecule or a complementary strand of a nucleic acid molecule (nickase activity), e.g., as compared to a naturally occurring Cas9 molecule (e.g., a Cas9 molecule of S aureus, S. pyogenes, or C. jejuni); or the ability to cleave a nucleic acid molecule, e.g., a double stranded or single stranded nucleic acid molecule, can be eliminated.

[1160] In an embodiment, the altered Cas9 molecule or Cas9 polypeptide is an eaCas9 molecule or eaCas9 polypeptide comprising one or more of the following activities: cleavage activity associated with a RuvC domain; cleavage activity associated with an HNH domain; cleavage activity associated with an HNH domain and cleavage activity associated with a RuvC domain.

[1161] In an embodiment, the altered Cas9 molecule or Cas9 polypeptide is an eiCas9 molecule or eiCas9 polypeptide which does not cleave a nucleic acid molecule (either double stranded or single stranded nucleic acid molecules) or cleaves a nucleic acid molecule with significantly less efficiency, e.g., less than 20, 10, 5, 1 or 0.1% of the cleavage activity of a reference Cas9 molecule, e.g., as measured by an assay described herein. The reference Cas9 molecule can be a naturally occurring unmodified Cas9 molecule, e.g., a naturally occurring Cas9 molecule such as a Cas9 molecule of S. pyogenes, S. thermophilus, S. aureus, C. jejuni or N. meningitidis. In an embodiment, the reference Cas9 molecule is the naturally occurring Cas9 molecule having the closest sequence identity or homology. In an embodiment, the eiCas9 molecule or eiCas9 polypeptide lacks substantial cleavage activity associated with a RuvC domain and cleavage activity associated with an HNH domain.

[1162] In an embodiment, the altered Cas9 molecule or Cas9 polypeptide is an eaCas9 molecule or eaCas9 polypeptide comprising the fixed amino acid residues of S. pyogenes shown in the consensus sequence disclosed in FIGS. 2A-2G, and has one or more amino acids that differ from the amino acid sequence of S. pyogenes (e.g., has a substitution) at one or more residue (e.g., 2, 3, 5, 10, 15, 20, 30, 50, 70, 80, 90, 100, 200 amino acid residues) represented by an “-” in the consensus sequence disclosed in FIGS. 2A-2G or SEQ ID NO: 7.

[1163] In an embodiment, the altered Cas9 molecule or Cas9 polypeptide comprises a sequence in which:
[1164] the sequence corresponding to the fixed sequence of the consensus sequence disclosed in FIGS. 2A-2G differs at no more than 1, 2, 3, 4, 5, 10, 15, or 20% of the fixed residues in the consensus sequence disclosed in FIGS. 2A-2G;
[1165] the sequence corresponding to the residues identified by “*” in the consensus sequence disclosed in FIGS. 2A-2G differ at no more than 1, 2, 3, 4, 5, 10, 15, 20, 25, 30, 35, or 40% of the “*” residues from the corresponding sequence of naturally occurring Cas9 molecule, e.g., an S. pyogenes Cas9 molecule; and,
[1166] the sequence corresponding to the residues identified by “-” in the consensus sequence disclosed in FIGS. 2A-2G differ at no more than 5, 10, 15, 20, 25, 30, 35, 40, 45, 55, or 60% of the “-” residues from the corresponding sequence of naturally occurring Cas9 molecule, e.g., an S. pyogenes Cas9 molecule.

[1167] In an embodiment, the altered Cas9 molecule or Cas9 polypeptide is an eaCas9 molecule or eaCas9 polypeptide comprising the fixed amino acid residues of S. thermophilus shown in the consensus sequence disclosed in FIGS. 2A-2G, and has one or more amino acids that differ from the amino acid sequence of S. thermophilus (e.g., has a substitution) at one or more residue (e.g., 2, 3, 5, 10, 15, 20, 30, 50, 70, 80, 90, 100, 200 amino acid residues) represented by an “-” in the consensus sequence disclosed in FIGS. 2A-2G.

[1168] In an embodiment the altered Cas9 molecule or Cas9 polypeptide comprises a sequence in which:
[1169] the sequence corresponding to the fixed sequence of the consensus sequence disclosed in FIGS. 2A-2G differs at no more than 1, 2, 3, 4, 5, 10, 15, or 20% of the fixed residues in the consensus sequence disclosed in FIGS. 2A-2G;
[1170] the sequence corresponding to the residues identified by “*” in the consensus sequence disclosed in FIGS. 2A-2G differ at no more than 1, 2, 3, 4, 5, 10, 15, 20, 25, 30, 35, or 40% of the “*” residues from the corresponding sequence of naturally occurring Cas9 molecule, e.g., an S. thermophilus Cas9 molecule; and,
[1171] the sequence corresponding to the residues identified by “-” in the consensus sequence disclosed in FIGS. 2A-2G differ at no more than 5, 10, 15, 20, 25, 30, 35, 40, 45, 55, or 60% of the “-” residues from the corresponding sequence of naturally occurring Cas9 molecule, e.g., an S. thermophilus Cas9 molecule.

[1172] In an embodiment, the altered Cas9 molecule or Cas9 polypeptide is an eaCas9 molecule or eaCas9 polypeptide comprising the fixed amino acid residues of S. mutans shown in the consensus sequence disclosed in FIGS. 2A-2G, and has one or more amino acids that differ from the amino acid sequence of S. mutans (e.g., has a substitution) at one or more residue (e.g., 2, 3, 5, 10, 15, 20, 30, 50, 70, 80, 90, 100, 200 amino acid residues) represented by an “-” in the consensus sequence disclosed in FIGS. 2A-2G.

[1173] In an embodiment, the altered Cas9 molecule or Cas9 polypeptide comprises a sequence in which:
[1174] the sequence corresponding to the fixed sequence of the consensus sequence disclosed in FIGS. 2A-2G differs at no more than 1, 2, 3, 4, 5, 10, 15, or 20% of the fixed residues in the consensus sequence disclosed in FIGS. 2A-2G;
[1175] the sequence corresponding to the residues identified by “*” in the consensus sequence disclosed in FIGS. 2A-2G differ at no more than 1, 2, 3, 4, 5, 10, 15, 20, 25, 30, 35, or 40% of the “*” residues from the corresponding sequence of naturally occurring Cas9 molecule, e.g., an S. mutans Cas9 molecule; and,
[1176] the sequence corresponding to the residues identified by “-” in the consensus sequence disclosed in FIGS. 2A-2G differ at no more than 5, 10, 15, 20, 25, 30, 35, 40, 45, 55, or 60% of the “-” residues from the corresponding sequence of naturally occurring Cas9 molecule, e.g., an S. mutans Cas9 molecule.

[1177] In an embodiment, the altered Cas9 molecule or Cas9 polypeptide is an eaCas9 molecule or eaCas9 polypeptide comprising the fixed amino acid residues of L. innocula shown in the consensus sequence disclosed in FIGS. 2A-2G, and has one or more amino acids that differ from the amino acid sequence of L. innocula (e.g., has a substitution) at one or more residue (e.g., 2, 3, 5, 10, 15, 20, 30, 50, 70, 80, 90, 100, 200 amino acid residues) represented by an “-” in the consensus sequence disclosed in FIGS. 2A-2G.

[1178] In an embodiment, the altered Cas9 molecule or Cas9 polypeptide comprises a sequence in which:
[1179] the sequence corresponding to the fixed sequence of the consensus sequence disclosed in FIGS. 2A-2G differs at no more than 1, 2, 3, 4, 5, 10, 15, or 20% of the fixed residues in the consensus sequence disclosed in FIGS. 2A-2G;
[1180] the sequence corresponding to the residues identified by “*” in the consensus sequence disclosed in FIGS. 2A-2G differ at no more than 1, 2, 3, 4, 5, 10, 15, 20, 25, 30, 35, or 40% of the “*” residues from the corresponding sequence of naturally occurring Cas9 molecule, e.g., an L. innocula Cas9 molecule; and,
[1181] the sequence corresponding to the residues identified by “-” in the consensus sequence disclosed in FIGS. 2A-2G differ at no more than 5, 10, 15, 20, 25, 30, 35, 40, 45, 55, or 60% of the “-” residues from the corresponding sequence of naturally occurring Cas9 molecule, e.g., an L. innocula Cas9 molecule.

[1182] In an embodiment, the altered Cas9 molecule or Cas9 polypeptide, e.g., an eaCas9 molecule, can be a fusion, e.g., of two of more different Cas9 molecules or Cas9 polypeptides, e.g., of two or more naturally occurring Cas9 molecules of different species. For example, a fragment of a naturally occurring Cas9 molecule of one species can be fused to a fragment of a Cas9 molecule of a second species. As an example, a fragment of Cas9 molecule of S. pyogenes comprising an N-terminal RuvC-like domain can be fused to a fragment of Cas9 molecule of a species other than S. pyogenes (e.g., S. thermophilus) comprising an HNH-like domain.

Cas9 Molecules and Cas9 Polypeptides with Altered PAM Recognition or No PAM Recognition

[1183] Naturally occurring Cas9 molecules can recognize specific PAM sequences, for example, the PAM recognition sequences described above for S. pyogenes, S. thermophilus, S. mutans, S. aureus and N. meningitidis.

[1184] In an embodiment, a Cas9 molecule or Cas9 polypeptide has the same PAM specificities as a naturally occurring Cas9 molecule. In other embodiments, a Cas9 molecule or Cas9 polypeptide has a PAM specificity not associated with a naturally occurring Cas9 molecule, or a PAM specificity not associated with the naturally occurring Cas9 molecule to which it has the closest sequence homology. For example, a naturally occurring Cas9 molecule can be altered, e.g., to alter PAM recognition, e.g., to alter the PAM sequence that the Cas9 molecule recognizes to decrease off target sites and/or improve specificity; or eliminate a PAM recognition requirement. In an embodiment, a Cas9 molecule or Cas9 polypeptide can be altered, e.g., to increase length of PAM recognition sequence and/or improve Cas9 specificity to high level of identity, e.g., to decrease off target sites and increase specificity. In an embodiment, the length of the PAM recognition sequence is at least 4, 5, 6, 7, 8, 9, 10 or 15 amino acids in length. Cas9 molecules or Cas9 polypeptides that recognize different PAM sequences and/or have reduced off-target activity can be generated using directed evolution. Exemplary methods and systems that can be used for directed evolution of Cas9 molecules are described, e.g., in Esvelt 2011. Candidate Cas9 molecules can be evaluated, e.g., by methods described in Section V.

[1185] Alterations of the PI domain, which mediates PAM recognition, are discussed below.

Synthetic Cas9 Molecules and Cas9 Polypeptides with Altered PI Domains

[1186] Current genome-editing methods are limited in the diversity of target sequences that can be targeted by the PAM sequence that is recognized by the Cas9 molecule utilized. A synthetic Cas9 molecule (or Syn-Cas9 molecule), or synthetic Cas9 polypeptide (or Syn-Cas9 polypeptide), as that term is used herein, refers to a Cas9 molecule or Cas9 polypeptide that comprises a Cas9 core domain from one bacterial species and a functional altered PI domain, i.e., a PI domain other than that naturally associated with the Cas9 core domain, e.g., from a different bacterial species.

[1187] In an embodiment, the altered PI domain recognizes a PAM sequence that is different from the PAM sequence recognized by the naturally-occurring Cas9 from which the Cas9 core domain is derived. In an embodiment, the altered PI domain recognizes the same PAM sequence recognized by the naturally-occurring Cas9 from which the Cas9 core domain is derived, but with different affinity or specificity. A Syn-Cas9 molecule or Syn-Cas9 polypeptide can be, respectively, a Syn-eaCas9 molecule or Syn-eaCas9 polypeptide or a Syn-eiCas9 molecule Syn-eiCas9 polypeptide.

[1188] An exemplary Syn-Cas9 molecule or Syn-Cas9 polypeptide comprises:
[1189] a) a Cas9 core domain, e.g., a Cas9 core domain from Table 12 or 13, e.g., a S. aureus, S. pyogenes, or C. jejuni Cas9 core domain; and
[1190] b) an altered PI domain from a species X Cas9 sequence selected from Tables 15 and 16.

[1191] In an embodiment, the RKR motif (the PAM binding motif) of said altered PI domain comprises: differences at 1, 2, or 3 amino acid residues; a difference in amino acid sequence at the first, second, or third position; differences in amino acid sequence at the first and second positions, the first and third positions, or the second and third positions; as compared with the sequence of the RKR motif of the native or endogenous PI domain associated with the Cas9 core domain.

[1192] In an embodiment, the Cas9 core domain comprises the Cas9 core domain from a species X Cas9 from Table 12 and said altered PI domain comprises a PI domain from a species Y Cas9 from Table 12.

[1193] In an embodiment, the RKR motif of the species X Cas9 is other than the RKR motif of the species Y Cas9.

[1194] In an embodiment, the RKR motif of the altered PI domain is selected from XXY, XNG, and XNQ.

[1195] In an embodiment, the altered PI domain has at least 60, 70, 80, 90, 95, or 100% homology with the amino acid sequence of a naturally occurring PI domain of said species Y from Table 12.

[1196] In an embodiment, the altered PI domain differs by no more than 50, 40, 30, 25, 20, 15, 10, 5, 4, 3, 2, or 1 amino acid residue from the amino acid sequence of a naturally occurring PI domain of said second species from Table 12.

[1197] In an embodiment, the Cas9 core domain comprises a S. aureus core domain and altered PI domain comprises: an A. denitrificans PI domain; a C. jejuni PI domain; a H. mustelae PI domain; or an altered PI domain of species X PI domain, wherein species X is selected from Table 16.

[1198] In an embodiment, the Cas9 core domain comprises a S. pyogenes core domain and the altered PI domain comprises: an A. denitrificans PI domain; a C. jejuni PI domain; a H. mustelae PI domain; or an altered PI domain of species X PI domain, wherein species X is selected from Table 16.

[1199] In an embodiment, the Cas9 core domain comprises a C. jejuni core domain and the altered PI domain comprises: an A. denitrificans PI domain; a H. mustelae PI domain; or an altered PI domain of species X PI domain, wherein species X is selected from Table 16.

[1200] In an embodiment, the Cas9 molecule or Cas9 polypeptide further comprises a linker disposed between said Cas9 core domain and said altered PI domain.

[1201] In an embodiment, the linker comprises: a linker described elsewhere herein disposed between the Cas9 core domain and the heterologous PI domain. Suitable linkers are further described in Section VI.

[1202] Exemplary altered PI domains for use in Syn-Cas9 molecules are described in Tables 15 and 16. The sequences for the 83 Cas9 orthologs referenced in Tables 15 and 16 are provided in Table 12. Table 14 provides the Cas9 orthologs with known PAM sequences and the corresponding RKR motif.

[1203] In an embodiment, a Syn-Cas9 molecule or Syn-Cas9 polypeptide may also be size-optimized, e.g., the Syn-Cas9 molecule or Syn-Cas9 polypeptide comprises one or more deletions, and optionally one or more linkers disposed between the amino acid residues flanking the deletions. In an embodiment, a Syn-Cas9 molecule or Syn-Cas9 polypeptide comprises a REC deletion.

### Size-Optimized Cas9 Molecules and Cas9 Polypeptides

[1204] Engineered Cas9 molecules and engineered Cas9 polypeptides described herein include a Cas9 molecule or Cas9 polypeptide comprising a deletion that reduces the size of the molecule while still retaining desired Cas9 properties, e.g., essentially native conformation, Cas9 nuclease activity, and/or target nucleic acid molecule recognition. Provided herein are Cas9 molecules or Cas9 polypeptides comprising one or more deletions and optionally one or more linkers, wherein a linker is disposed between the amino acid residues that flank the deletion. Methods for identifying suitable deletions in a reference Cas9 molecule, methods for generating Cas9 molecules with a deletion and a linker, and methods for using such Cas9 molecules will be apparent to one of ordinary skill in the art upon review of this document.

[1205] A Cas9 molecule, e.g., a S. aureus, S. pyogenes, or C. jejuni, Cas9 molecule, having a deletion is smaller, e.g., has reduced number of amino acids, than the corresponding naturally-occurring Cas9 molecule. The smaller size of the Cas9 molecules allows increased flexibility for delivery methods, and thereby increases utility for genome-editing. A Cas9 molecule or Cas9 polypeptide can comprise one or more deletions that do not substantially affect or decrease the activity of the resultant Cas9 molecules or Cas9 polypeptides described herein. Activities that are retained in the Cas9 molecules or Cas9 polypeptides comprising a deletion as described herein include one or more of the following:
[1206] a nickase activity, i.e., the ability to cleave a single strand, e.g., the non-complementary strand or the complementary strand, of a nucleic acid molecule; a double stranded nuclease activity, i.e., the ability to cleave both strands of a double stranded nucleic acid and create a double stranded break, which in an embodiment is the presence of two nickase activities;
[1207] an endonuclease activity;
[1208] an exonuclease activity;
[1209] a helicase activity, i.e., the ability to unwind the helical structure of a double stranded nucleic acid;
[1210] and recognition activity of a nucleic acid molecule, e.g., a target nucleic acid or a gRNA.

[1211] Activity of the Cas9 molecules or Cas9 polypeptides described herein can be assessed using the activity assays described herein or in the art.

### Identifying Regions Suitable for Deletion

[1212] Suitable regions of Cas9 molecules for deletion can be identified by a variety of methods. Naturally-occurring orthologous Cas9 molecules from various bacterial species, e.g., any one of those listed in Table 12, can be modeled onto the crystal structure of S. pyogenes Cas9 (Nishimasu 2014) to examine the level of conservation across the selected Cas9 orthologs with respect to the three-dimensional conformation of the protein. Less conserved or unconserved regions that are spatially located distant from regions involved in Cas9 activity, e.g., interface with the target nucleic acid molecule and/or gRNA, represent regions or domains are candidates for deletion without substantially affecting or decreasing Cas9 activity.

### REC-Optimized Cas9 Molecules and Cas9 Polypeptides

[1213] A REC-optimized Cas9 molecule, or a REC-optimized Cas9 polypeptide, as that term is used herein, refers to a Cas9 molecule or Cas9 polypeptide that comprises a deletion in one or both of the REC2 domain and the RE1_{CT} domain (collectively a REC deletion), wherein the deletion comprises at least 10% of the amino acid residues in the cognate domain. A REC-optimized Cas9 molecule or Cas9 polypeptide can be an eaCas9 molecule or eaCas9 polypeptide, or an eiCas9 molecule or eiCas9 polypeptide. An exemplary REC-optimized Cas9 molecule or REC-optimized Cas9 polypeptide comprises:
[1214] a) a deletion selected from:
   [1215] i) a REC2 deletion;
   [1216] ii) a REC1_{CT} deletion; or
   [1217] iii) a REC1_{SUB} deletion.

[1218] Optionally, a linker is disposed between the amino acid residues that flank the deletion. In an embodiment, a Cas9 molecule or Cas9 polypeptide includes only one deletion, or only two deletions. A Cas9 molecule or Cas9 polypeptide can comprise a REC2 deletion and a REC1_{CT} deletion. A Cas9 molecule or Cas9 polypeptide can comprise a REC2 deletion and a REC1_{SUB} deletion.

[1219] Generally, the deletion will contain at least 10% of the amino acids in the cognate domain, e.g., a REC2 deletion will include at least 10% of the amino acids in the REC2 domain.

[1220] A deletion can comprise: at least 10, 20, 30, 40, 50, 60, 70, 80, or 90% of the amino acid residues of its cognate domain; all of the amino acid residues of its cognate domain; an amino acid residue outside its cognate domain; a plurality of amino acid residues outside its cognate domain; the amino acid residue immediately N terminal to its cognate domain; the amino acid residue immediately C terminal to its cognate domain; the amino acid residue immediately N terminal to its cognate and the amino acid residue immediately C terminal to its cognate domain; a plurality of, e.g., up to 5, 10, 15, or 20, amino acid residues N terminal to its cognate domain; a plurality of, e.g., up to 5, 10, 15, or 20, amino acid residues C terminal to its cognate domain; a plurality of, e.g., up to 5, 10, 15, or 20, amino acid residues N terminal to its cognate domain and a plurality of e.g., up to 5, 10, 15, or 20, amino acid residues C terminal to its cognate domain.

[1221] In an embodiment, a deletion does not extend beyond: its cognate domain; the N terminal amino acid residue of its cognate domain; the C terminal amino acid residue of its cognate domain.

[1222] A REC-optimized Cas9 molecule or REC-optimized Cas9 polypeptide can include a linker disposed between the amino acid residues that flank the deletion. Suitable linkers for use between the amino acid resides that flank a REC deletion in a REC-optimized Cas9 molecule or REC-optimized Cas9 polypeptide is disclosed in Section VI.

[1223] In an embodiment, a REC-optimized Cas9 molecule or REC-optimized Cas9 polypeptide comprises an amino acid sequence that, other than any REC deletion and associated linker, has at least 50, 55, 60, 65, 70, 75, 80, 85, 90, 95, 99, or 100% homology with the amino acid sequence of a naturally occurring Cas 9, e.g., a Cas9 molecule described in Table 12, e.g., a S. aureus Cas9 molecule, a S. pyogenes Cas9 molecule, or a C. jejuni Cas9 molecule.

[1224] In an embodiment, a REC-optimized Cas9 molecule or REC-optimized Cas9 polypeptide comprises an amino acid sequence that, other than any REC deletion and associated linker, differs by no more than 1, 2, 3, 4, 5, 6, 7, 8, 9, 10, 15, 20, or 25, amino acid residues from the amino acid sequence of a naturally occurring Cas 9, e.g., a Cas9 molecule described in Table 12, e.g., a S. aureus Cas9 molecule, a S. pyogenes Cas9 molecule, or a C. jejuni Cas9 molecule.

[1225] In an embodiment, a REC-optimized Cas9 molecule or REC-optimized Cas9 polypeptide comprises an amino acid sequence that, other than any REC deletion and associate linker, differs by no more than 1, 2, 3, 4, 5, 6, 7, 8, 9, 10, 15, 20, or 25% of the, amino acid residues from the amino acid sequence of a naturally occurring Cas 9, e.g., a Cas9 molecule described in Table 12, e.g., a S. aureus Cas9 molecule, a S. pyogenes Cas9 molecule, or a C. jejuni Cas9 molecule.

[1226] For sequence comparison, typically one sequence acts as a reference sequence, to which test sequences are compared. When using a sequence comparison algorithm, test and reference sequences are entered into a computer, subsequence coordinates are designated, if necessary, and sequence algorithm program parameters are designated. Default program parameters can be used, or alternative parameters can be designated. The sequence comparison algorithm then calculates the percent sequence identities for the test sequences relative to the reference sequence, based on the program parameters. Methods of alignment of sequences for comparison are well known in the art. Optimal alignment of sequences for comparison can be conducted, e.g., by the local homology algorithm of Smith & Waterman 1981, by the homology alignment algorithm of Needleman & Wunsch 1970, by the search for similarity method of Pearson & Lipman 1988, by computerized implementations of these algorithms (GAP, BESTFIT, FASTA, and TFASTA in the Wisconsin Genetics Software Package, Genetics Computer Group, 575 Science Dr., Madison, WI), or by manual alignment and visual inspection (see, e.g., Brent et al., Current Protocols in Molecular Biology, John Wiley & Sons, Inc. (2003)).

[1227] Two examples of algorithms that are suitable for determining percent sequence identity and sequence similarity are the BLAST and BLAST 2.0 algorithms, which are described in Altschul 1977 and Altschul 1990), respectively. Software for performing BLAST analyses is publicly available through the National Center for Biotechnology Information.

[1228] The percent identity between two amino acid sequences can also be determined using the algorithm of Myers 1988, which has been incorporated into the ALIGN program (version 2.0), using a PAM120 weight residue table, a gap length penalty of 12 and a gap penalty of 4. In addition, the percent identity between two amino acid sequences can be determined using the Needleman & Wunsch 1970 algorithm, which has been incorporated into the GAP program in the GCG software package (available at www.gcg.com), using either a Blossom 62 matrix or a PAM250 matrix, and a gap weight of 16, 14, 12, 10, 8, 6, or 4 and a length weight of 1, 2, 3, 4, 5, or 6.

[1229] Sequence information for exemplary REC deletions are provided for 83 naturally-occurring Cas9 orthologs in Table 12. The amino acid sequences of exemplary Cas9 molecules from different bacterial species are shown below.

TABLE 12
Amino Acid Sequence of Cas9 Orthologs

| | | REC2 | | | REC1_{CT} | | | Rec_{sub} | | |
|---|---|---|---|---|---|---|---|---|---|---|
| | Amino | start | stop | # AA | start | stop | # AA | start | stop | # AA |
| | acid | (AA | (AA | deleted | (AA | (AA | deleted | (AA | (AA | deleted |
| Species/Composite ID | sequence | pos) | pos) | (n) | pos) | pos) | (n) | pos) | pos) | (n) |
| Staphylococcus aureus | SEQ ID | 126 | 166 | 41 | 296 | 352 | 57 | 296 | 352 | 57 |
| tr\|J7RUA5\|J7RUA5_STAAU | NO: 26 | | | | | | | | | |
| Streptococcus pyogenes | SEQ ID | 176 | 314 | 139 | 511 | 592 | 82 | 511 | 592 | 82 |
| sp\|Q99ZW2\|CAS9_STRP1 | NO: 2 | | | | | | | | | |
| Campylobacter jejuni NCTC 11168 | SEQ ID | 137 | 181 | 45 | 316 | 360 | 45 | 316 | 360 | 45 |
| gi\|218563121\|ref\|YP_002344900.1 | NO: 306 | | | | | | | | | |
| Bacteroides fragilis NCTC 9343 | SEQ ID | 148 | 339 | 192 | 524 | 617 | 84 | 524 | 617 | 84 |
| gi\|60683389\|ref\|YP_213533.1\| | NO: 307 | | | | | | | | | |
| Bifidobacterium bifidum S17 | SEQ ID | 173 | 335 | 163 | 516 | 607 | 87 | 516 | 607 | 87 |
| gi\|310286728\|ref\|YP_003937986. | NO: 308 | | | | | | | | | |
| Veillonella atypica ACS-134-V-Col7a | SEQ ID | 185 | 339 | 155 | 574 | 663 | 79 | 574 | 663 | 79 |
| gi\|303229466\|ref\|ZP_07316256.1 | NO: 309 | | | | | | | | | |
| Lactobacillus rhamnosus GG | SEQ ID | 169 | 320 | 152 | 559 | 645 | 78 | 559 | 645 | 78 |
| gi\|258509199\|ref\|YP_003171950.1 | NO: 310 | | | | | | | | | |
| Filifactor alocis ATCC 35896 | SEQ ID | 166 | 314 | 149 | 508 | 592 | 76 | 508 | 592 | 76 |
| gi\|374307738\|ref\|YP_005054169.1 | NO: 311 | | | | | | | | | |
| Oenococcus kitaharae DSM 17330 | SEQ ID | 169 | 317 | 149 | 555 | 639 | 80 | 555 | 639 | 80 |
| gi\|366983953\|gb\|EHN59352.1\| | NO: 312 | | | | | | | | | |
| Fructobacillus fructosus KCTC 3544 | SEQ ID | 168 | 314 | 147 | 488 | 571 | 76 | 488 | 571 | 76 |
| gi\|339625081\|ref\|ZP_08660870.1 | NO: 313 | | | | | | | | | |
| Catenibacterium mitsuokai DSM 15897 | SEQ ID | 173 | 318 | 146 | 511 | 594 | 78 | 511 | 594 | 78 |
| gi\|224543312\|ref\|ZP_03683851.1 | NO: 314 | | | | | | | | | |
| Finegoldia magna ATCC 29328 | SEQ ID | 168 | 313 | 146 | 452 | 534 | 77 | 452 | 534 | 77 |
| gi\|169823755\|ref\|YP_001691366.1 | NO: 315 | | | | | | | | | |
| Coriobacterium glomerans PW2 | SEQ ID | 175 | 318 | 144 | 511 | 592 | 82 | 511 | 592 | 82 |
| gi\|328956315\|ref\|YP_004373648.1 | NO: 316 | | | | | | | | | |
| Eubacterium yurii ATCC 43715 | SEQ ID | 169 | 310 | 142 | 552 | 633 | 76 | 552 | 633 | 76 |
| gi\|306821691\|ref\|ZP_07455288.1 | NO: 317 | | | | | | | | | |
| Peptoniphilus duerdenii | SEQ ID | 171 | 311 | 141 | 535 | 615 | 76 | 535 | 615 | 76 |
| ATCC BAA-1640 | NO: 318 | | | | | | | | | |
| gi\|304438954\|ref\|ZP_07398877.1 | | | | | | | | | | |
| Acidaminococcus sp. D21 | SEQ ID | 167 | 306 | 140 | 511 | 591 | 75 | 511 | 591 | 75 |
| gi\|227824983\|ref\|ZP_03989815.1 | NO: 319 | | | | | | | | | |
| Lactobacillus farciminis KCTC 3681 | SEQ ID | 171 | 310 | 140 | 542 | 621 | 85 | 542 | 621 | 85 |
| gi\|336394882\|ref\|ZP_08576281.1 | NO: 320 | | | | | | | | | |
| Streptococcus sanguinis SK49 | SEQ ID | 185 | 324 | 140 | 411 | 490 | 85 | 411 | 490 | 85 |
| gi\|422884106\|ref\|ZP_16930555.1 | NO: 321 | | | | | | | | | |
| Coprococcus catus GD-7 | SEQ ID | 172 | 310 | 139 | 556 | 634 | 76 | 556 | 634 | 76 |
| gi\|291520705\|emb\|CBK78998.1\| | NO: 322 | | | | | | | | | |
| Streptococcus mutans UA159 | SEQ ID | 176 | 314 | 139 | 392 | 470 | 84 | 392 | 470 | 84 |
| gi\|24379809\|ref\|NP_721764.1\| | NO: 1 | | | | | | | | | |
| Streptococcus pyogenes M1 GAS | SEQ ID | 176 | 314 | 139 | 523 | 600 | 82 | 523 | 600 | 82 |
| gi\|13622193\|gb\|AAK33936.1\| | NO: 2 | | | | | | | | | |
| Streptococcus thermophilus LMD-9 | SEQ ID | 176 | 314 | 139 | 481 | 558 | 81 | 481 | 558 | 81 |
| gi\|116628213\|ref\|YP_820832.1\| | NO: 3 | | | | | | | | | |
| Fusobacterium nucleatum ATCC 49256 | SEQ ID | 171 | 308 | 138 | 537 | 614 | 76 | 537 | 614 | 76 |
| gi\|34762592\|ref\|ZP_00143587.1\| | NO: 326 | | | | | | | | | |
| Planococcus antarcticus DSM 14505 | SEQ ID | 162 | 299 | 138 | 538 | 614 | 94 | 538 | 614 | 94 |
| gi\|389815359\|ref\|ZP_10206685.1 | NO: 327 | | | | | | | | | |
| Treponema denticola ATCC 35405 | SEQ ID | 169 | 305 | 137 | 524 | 600 | 81 | 524 | 600 | 81 |
| gi\|42525843\|ref\|NP_970941.1\| | NO: 328 | | | | | | | | | |
| Solobacterium moorei F0204 | SEQ ID | 179 | 314 | 136 | 544 | 619 | 77 | 544 | 619 | 77 |
| gi\|320528778\|ref\|ZP_08029929.1 | NO: 329 | | | | | | | | | |
| Staphylococcus pseudintermedius ED99 | SEQ ID | 164 | 299 | 136 | 531 | 606 | 92 | 531 | 606 | 92 |
| gi\|323463801\|gb\|ADX75954.1\| | NO: 330 | | | | | | | | | |
| Flavobacterium branchiophilum FL-15 | SEQ ID | 162 | 286 | 125 | 538 | 613 | 63 | 538 | 613 | 63 |
| gi\|347536497\|ref\|YP_004843922.1 | NO: 331 | | | | | | | | | |
| Ignavibacterium album JCM 16511 | SEQ ID | 223 | 329 | 107 | 357 | 432 | 90 | 357 | 432 | 90 |
| gi\|385811609\|ref\|YP_005848005.1 | NO: 332 | | | | | | | | | |
| Bergeyella zoohelcum ATCC 43767 | SEQ ID | 165 | 261 | 97 | 529 | 604 | 56 | 529 | 604 | 56 |
| gi\|423317190\|ref\|ZP_17295095.1 | NO: 333 | | | | | | | | | |
| Nitrobacter hamburgensis X14 | SEQ ID | 169 | 253 | 85 | 536 | 611 | 48 | 536 | 611 | 48 |
| gi\|92109262\|ref\|YP_571550.1\| | NO: 334 | | | | | | | | | |
| Odoribacter laneus YIT 12061 | SEQ ID | 164 | 242 | 79 | 535 | 610 | 63 | 535 | 610 | 63 |
| gi\|374384763\|ref\|ZP_09642280.1 | NO: 335 | | | | | | | | | |
| Legionella pneumophila str. Paris | SEQ ID | 164 | 239 | 76 | 402 | 476 | 67 | 402 | 476 | 67 |
| gi\|54296138\|ref\|YP_122507.1\| | NO: 336 | | | | | | | | | |
| Bacteroides sp. 20_3 | SEQ ID | 198 | 269 | 72 | 530 | 604 | 83 | 530 | 604 | 83 |
| gi\|301311869\|ref\|ZP_07217791.1 | NO: 337 | | | | | | | | | |
| Akkermansia muciniphila | SEQ ID | 136 | 202 | 67 | 348 | 418 | 62 | 348 | 418 | 62 |
| ATCC BAA-835 | NO: 338 | | | | | | | | | |
| gi\|187736489\|ref\|YP_001878601. | | | | | | | | | | |
| Prevotella sp. C561 | SEQ ID | 184 | 250 | 67 | 357 | 425 | 78 | 357 | 425 | 78 |
| gi\|345885718\|ref\|ZP_08837074.1 | NO: 339 | | | | | | | | | |
| Wolinella succinogenes DSM 1740 | SEQ ID | 157 | 218 | 36 | 401 | 468 | 60 | 401 | 468 | 60 |
| gi\|34557932\|ref\|NP_907747.1\| | NO: 340 | | | | | | | | | |
| Alicyclobacillus hesperidum | SEQ ID | 142 | 196 | 55 | 416 | 482 | 61 | 416 | 482 | 61 |
| URH17-3-68 | NO: 341 | | | | | | | | | |
| gi\|403744858\|ref\|ZP_10953934.1 | | | | | | | | | | |
| Caenispirillum salinarum AK4 | SEQ ID | 161 | 214 | 54 | 330 | 393 | 68 | 330 | 393 | 68 |
| gi\|427429481\|ref\|ZP_18919511.1 | NO: 342 | | | | | | | | | |
| Eubacterium rectale ATCC 33656 | SEQ ID | 133 | 185 | 53 | 322 | 384 | 60 | 322 | 384 | 60 |
| gi\|238924075\|ref\|YP_002937591.1 | NO: 343 | | | | | | | | | |
| Mycoplasma synoviae 53 | SEQ ID | 187 | 239 | 53 | 319 | 381 | 80 | 319 | 381 | 80 |
| gi\|71894592\|ref\|YP_278700.1\| | NO: 344 | | | | | | | | | |
| Porphyromonas | SEQ ID | 150 | 202 | 53 | 309 | 371 | 60 | 309 | 371 | 60 |
| sp. oral taxon 279 str. F0450 | NO: 345 | | | | | | | | | |
| gi\|402847315\|ref\|ZP_10895610.1 | | | | | | | | | | |
| Streptococcus thermophilus LMD-9 | SEQ ID | 127 | 178 | 139 | 424 | 486 | 81 | 424 | 486 | 81 |
| gi\|116627542\|ref\|YP_820161.1\| | NO: 346 | | | | | | | | | |
| Roseburia inulinivorans DSM 16841 | SEQ ID | 154 | 204 | 51 | 318 | 380 | 69 | 318 | 380 | 69 |
| gi\|225377804\|ref\|ZP_03755025.1 | NO: 347 | | | | | | | | | |
| Methylosinus trichosporium OB3b | SEQ ID | 144 | 193 | 50 | 426 | 488 | 64 | 426 | 488 | 64 |
| gi\|296446027\|ref\|ZP_06887976.1 | NO: 348 | | | | | | | | | |
| Ruminococcus albus 8 | SEQ ID | 139 | 187 | 49 | 351 | 412 | 55 | 351 | 412 | 55 |
| gi\|325677756\|ref\|ZP_08157403.1 | NO: 349 | | | | | | | | | |
| Bifidobacterium longum DJO10A | SEQ ID | 183 | 230 | 48 | 370 | 431 | 44 | 370 | 431 | 44 |
| gi\|189440764\|ref\|YP_001955845. | NO: 350 | | | | | | | | | |
| Enterococcus faecalis TX0012 | SEQ ID | 123 | 170 | 48 | 327 | 387 | 60 | 327 | 387 | 60 |
| gi\|315149830\|gb\|EFT93846.1\| | NO: 351 | | | | | | | | | |
| Mycoplasma mobile 163K | SEQ ID | 179 | 226 | 48 | 314 | 374 | 79 | 314 | 374 | 79 |
| gi\|47458868\|ref\|YP_015730.1\| | NO: 352 | | | | | | | | | |
| Actinomyces coleocanis DSM 15436 | SEQ ID | 147 | 193 | 47 | 358 | 418 | 40 | 358 | 418 | 40 |
| gi\|227494853\|ref\|ZP_03925169.1 | NO: 353 | | | | | | | | | |
| Dinoroseobacter shibae DFL 12 | SEQ ID | 138 | 184 | 47 | 338 | 398 | 48 | 338 | 398 | 48 |
| gi\|159042956\|ref\|YP_001531750.1 | NO: 354 | | | | | | | | | |
| Actinomyces | SEQ ID | 183 | 228 | 46 | 349 | 409 | 40 | 349 | 409 | 40 |
| sp. oral taxon 180 str. F0310 | NO: 355 | | | | | | | | | |
| gi\|315605738\|ref\|ZP_07880770.1 | | | | | | | | | | |
| Alcanivorax sp. W11-5 | SEQ ID | 139 | 183 | 45 | 344 | 404 | 61 | 344 | 404 | 61 |
| gi\|407803669\|ref\|ZP_11150502.1 | NO: 356 | | | | | | | | | |
| Aminomonas paucivorans DSM 12260 | SEQ ID | 134 | 178 | 45 | 341 | 401 | 63 | 341 | 401 | 63 |
| gi\|312879015\|ref\|ZP_07738815.1 | NO: 357 | | | | | | | | | |
| Mycoplasma canis PG 14 | SEQ ID | 139 | 183 | 45 | 319 | 379 | 76 | 319 | 379 | 76 |
| gi\|384393286\|gb\|EIE39736.1\| | NO: 358 | | | | | | | | | |
| Lactobacillus coryniformis KCTC 3535 | SEQ ID | 141 | 184 | 44 | 328 | 387 | 61 | 328 | 387 | 61 |
| gi\|336393381\|ref\|ZP_08574780.1 | NO: 359 | | | | | | | | | |
| Elusimicrobium minutum Pei191 | SEQ ID | 177 | 219 | 43 | 322 | 381 | 47 | 322 | 381 | 47 |
| gi\|187250660\|ref\|YP_001875142.1 | NO: 360 | | | | | | | | | |
| Neisseria meningitidis Z2491 | SEQ ID | 147 | 189 | 43 | 360 | 419 | 61 | 360 | 419 | 61 |
| gi\|218767588\|ref\|YP_002342100.1 | NO: 25 | | | | | | | | | |
| Pasteurella multocida str. Pm70 | SEQ ID | 139 | 181 | 43 | 319 | 378 | 61 | 319 | 378 | 61 |
| gi\|15602992\|ref\|NP_246064.1\| | NO: 362 | | | | | | | | | |
| Rhodovulum sp. PH10 | SEQ ID | 141 | 183 | 43 | 319 | 378 | 48 | 319 | 378 | 48 |
| gi\|402849997\|ref\|ZP_10898214.1 | NO: 363 | | | | | | | | | |
| Eubacterium dolichum DSM 3991 | SEQ ID | 131 | 172 | 42 | 303 | 361 | 59 | 303 | 361 | 59 |
| gi\|160915782\|ref\|ZP_02077990.1 | NO: 364 | | | | | | | | | |
| Nitratifractor salsuginis DSM 16511 | SEQ ID | 143 | 184 | 42 | 347 | 404 | 61 | 347 | 404 | 61 |
| gi\|319957206\|ref\|YP_004168469.1 | NO: 365 | | | | | | | | | |
| Rhodospirillum rubrum ATCC 11170 | SEQ ID | 139 | 180 | 42 | 314 | 371 | 55 | 314 | 371 | 55 |
| gi\|83591793\|ref\|YP_425545.1\| | NO: 366 | | | | | | | | | |
| Clostridium cellulolyticum H10 | SEQ ID | 137 | 176 | 40 | 320 | 376 | 61 | 320 | 376 | 61 |
| gi\|220930482\|ref\|YP_002507391.1 | NO: 367 | | | | | | | | | |
| Helicobacter mustelae 12198 | SEQ ID | 148 | 187 | 40 | 298 | 354 | 48 | 298 | 354 | 48 |
| gi\|291276265\|ref\|YP_003516037.1 | NO: 368 | | | | | | | | | |
| Ilyobacter polytropus DSM 2926 | SEQ ID | 134 | 173 | 40 | 462 | 517 | 63 | 462 | 517 | 63 |
| gi\|310780384\|ref\|YP_003968716.1 | NO: 369 | | | | | | | | | |
| Sphaerochaeta globus str. Buddy | SEQ ID | 163 | 202 | 40 | 335 | 389 | 45 | 335 | 389 | 45 |
| gi\|325972003\|ref\|YP_004248194.1 | NO: 370 | | | | | | | | | |
| Staphylococcus lugdunensis M23590 | SEQ ID | 128 | 167 | 40 | 337 | 391 | 57 | 337 | 391 | 57 |
| gi\|315659848\|ref\|ZP_07912707.1 | NO: 371 | | | | | | | | | |
| Treponema sp. JC4 | SEQ ID | 144 | 183 | 40 | 328 | 382 | 63 | 328 | 382 | 63 |
| gi\|384109266\|ref\|ZP_10010146.1 | NO: 372 | | | | | | | | | |
| Uncultured Deltaproteobacterium | SEQ ID | 154 | 193 | 40 | 313 | 365 | 55 | 313 | 365 | 55 |
| HF0070 07E19 | NO: 373 | | | | | | | | | |
| gi\|297182908\|gb\|ADI19058.1\| | | | | | | | | | | |
| Alicycliphilus denitrificans K601 | SEQ ID | 140 | 178 | 39 | 317 | 366 | 48 | 317 | 366 | 48 |
| gi\|330822845\|ref\|YP_004386148.1 | NO: 374 | | | | | | | | | |
| Azospirillum sp. B510 | SEQ ID | 205 | 243 | 39 | 342 | 389 | 46 | 342 | 389 | 46 |
| gi\|288957741\|ref\|YP_003448082.1 | NO: 375 | | | | | | | | | |
| Bradyrhizobium sp. BTAi1 | SEQ ID | 143 | 181 | 39 | 323 | 370 | 48 | 323 | 370 | 48 |
| gi\|148255343\|ref\|YP_001239928.1 | NO: 376 | | | | | | | | | |
| Parvibaculum lavamentivorans DS-1 | SEQ ID | 138 | 176 | 39 | 327 | 374 | 58 | 327 | 374 | 58 |
| gi\|154250555\|ref\|YP_001411379.1 | NO: 377 | | | | | | | | | |
| Prevotella timonensis CRIS 5C-B1 | SEQ ID | 170 | 208 | 39 | 328 | 375 | 61 | 328 | 375 | 61 |
| gi\|282880052\|ref\|ZP_06288774.1 | NO: 378 | | | | | | | | | |
| Bacillus smithii 7 3 47FAA | SEQ ID | 134 | 171 | 38 | 401 | 448 | 63 | 401 | 448 | 63 |
| gi\|365156657\|ref\|ZP_09352959.1 | NO: 379 | | | | | | | | | |
| Candidatus Puniceispirillum | SEQ ID | 135 | 172 | 38 | 344 | 391 | 53 | 344 | 391 | 53 |
| marinum IMCC1322 | NO: 380 | | | | | | | | | |
| gi\|294086111\|ref\|YP_003552871.1 | | | | | | | | | | |
| Barnesiella intestinihominis YIT 11860 | SEQ ID | 140 | 176 | 37 | 371 | 417 | 60 | 371 | 417 | 60 |
| gi\|404487228\|ref\|ZP_11022414.1 | NO: 381 | | | | | | | | | |
| Ralstonia syzygii R24 | SEQ ID | 140 | 176 | 37 | 395 | 440 | 50 | 395 | 440 | 50 |
| gi\|344171927\|emb\|CCA84553.1\| | NO: 382 | | | | | | | | | |
| Wolinella succinogenes DSM 1740 | SEQ ID | 145 | 180 | 36 | 348 | 392 | 60 | 348 | 392 | 60 |
| gi\|34557790\|ref\|NP_907605.1\| | NO: 383 | | | | | | | | | |
| Mycoplasma gallisepticum str. F | SEQ ID | 144 | 177 | 34 | 373 | 416 | 71 | 373 | 416 | 71 |
| gi\|284931710\|gb\|ADC31648.1\| | NO: 384 | | | | | | | | | |
| Acidothermus cellulolyticus 11B | SEQ ID | 150 | 182 | 33 | 341 | 380 | 58 | 341 | 380 | 58 |
| gi\|117929158\|ref\|YP_873709.1\| | NO: 385 | | | | | | | | | |
| Mycoplasma ovipneumoniae SC01 | SEQ ID | 156 | 184 | 29 | 381 | 420 | 62 | 381 | 420 | 62 |
| gi\|363542550\|ref\|ZP_09312133.1 | NO: 386 | | | | | | | | | |

TABLE 13
Amino Acid Sequence of Cas9 Core Domains

| | |
|---|---|
| Cas9 Start | Cas9 Stop |
| (AA pos) | (AA pos) |

| | |
|---|---|
| | Start and Stop numbers refer |
| Strain Name | to the sequence in Table 11 |

| | | |
|---|---|---|
| Staphylococcus aureus | 1 | 772 |
| Streptococcus pyogenes | 1 | 1099 |
| Campulobacter jejuni | 1 | 741 |

TABLE 14
Identified PAM sequences and corresponding RKR motifs.

| | PAM sequence | RKR motif |
|---|---|---|
| Strain Name | (NA) | (AA) |
| Streptococcus pyogenes | NGG | RKR |
| Streptococcus mutans | NGG | RKR |
| Streptococcus thermophilus A | NGGNG | RYR |
| Treponema denticola | NAAAAN | VAK |
| Streptococcus thermophilus B | NNAAAAW | IYK |
| Campylobacter jejuni | NNNNACA | NLK |
| Pasteurella multocida | GNNNCNNA | KDG |
| Neisseria meningitidis | NNNNGATT or | IGK |
| Staphylococcus aureus | NNGRRV (R = A or G; V = A. | NDK |
| | G or C) NNGRRT (R = A or G) | |

PI domains are provided in Tables 15 and 16.

TABLE 15
Altered PI Domains

| | PI Start | PI Stop | | |
|---|---|---|---|---|
| | (AA pos) | (AA pos) | | |
| | Start and Stop | | | |
| | numbers refer | | Length | RKR |
| | to the sequences | | of PI | motif |
| Strain Name | in Table 11 | | (AA) | (AA) |
| Alicycliphilus | 837 | 1029 | 193 | --Y |
| denitrificans K601 | | | | |
| Campylobacter jejuni | 741 | 984 | 244 | -NG |
| NCTC 11168 | | | | |
| Helicobacter mustelae | 771 | 1024 | 254 | -NQ |
| 12198 | | | | |

TABLE 16
Other Altered PI Domains

| | PI Start | PI Stop | | |
|---|---|---|---|---|
| | (AA | (AA | | |
| | pos) | pos) | | |
| | Start and Stop | | | |
| | numbers refer | | Length | RKR |
| | to the sequences | | of PI | motif |
| Strain Name | in Table 11 | | (AA) | (AA) |
| Akkermansia muciniphila ATCC | 871 | 1101 | 231 | ALK |
| BAA-835 | | | | |
| Ralstonia syzygii R24 | 821 | 1062 | 242 | APY |
| Cand. Puniceispirillum marinum | 815 | 1035 | 221 | AYK |
| IMCC1322 | | | | |
| Fructobacillus fructosus KCTC 3544 | 1074 | 1323 | 250 | DGN |
| Eubacterium yurii ATCC 43715 | 1107 | 1391 | 285 | DGY |
| Eubacterium dolichum DSM 3991 | 779 | 1096 | 318 | DKK |
| Dinoroseobacter shibae DFL 12 | 851 | 1079 | 229 | DPI |
| Clostridium cellulolyticum H10 | 767 | 1021 | 255 | EGK |
| Pasteurella multocida str. Pm70 | 815 | 1056 | 242 | ENN |
| Mycoplasma canis PG 14 | 907 | 1233 | 327 | EPK |
| Porphyromonas sp. oral taxon 279 str. | 935 | 1197 | 263 | EPT |
| F0450 | | | | |
| Filifactor alocis ATCC 35896 | 1094 | 1365 | 272 | EVD |
| Aminomonas paucivorans DSM 12260 | 801 | 1052 | 252 | EVY |
| Wolinella succinogenes DSM 1740 | 1034 | 1409 | 376 | EYK |
| Oenococcus kitaharae DSM 17330 | 1119 | 1389 | 271 | GAL |
| CoriobacteriumglomeransPW2 | 1126 | 1384 | 259 | GDR |
| Peptoniphilus duerdenii ATCC | 1091 | 1364 | 274 | GDS |
| BAA-1640 | | | | |
| Bifidobacterium bifidum S17 | 1138 | 1420 | 283 | GGL |
| Alicyclobacillus hesperidum | 876 | 1146 | 271 | GGR |
| URH17-3-68 | | | | |
| Roseburia inulinivorans DSM 16841 | 895 | 1152 | 258 | GGT |
| Actinomyces coleocanis DSM 15436 | 843 | 1105 | 263 | GKK |
| Odoribacter laneus YIT 12061 | 1103 | 1498 | 396 | GKV |
| Coprococcus catus GD-7 | 1063 | 1338 | 276 | GNQ |
| Enterococcus faecalis TX0012 | 829 | 1150 | 322 | GRK |
| Bacillus smithii 7 3 47FAA | 809 | 1088 | 280 | GSK |
| Legionella pneumophila str. Paris | 1021 | 1372 | 352 | GTM |
| Bacteroides fragilis NCTC 9343 | 1140 | 1436 | 297 | IPV |
| Mycoplasma ovipneumoniae SC01 | 923 | 1265 | 343 | IRI |
| Actinomyces sp. oral taxon 180 str. | 895 | 1181 | 287 | KEK |
| F0310 | | | | |
| Treponema sp. JC4 | 832 | 1062 | 231 | KIS |
| Fusobacteriumnucleatum ATCC49256 | 1073 | 1374 | 302 | KKV |
| Lactobacillus farciminis KCTC 3681 | 1101 | 1356 | 256 | KKV |
| Nitratifractor salsuginis | 840 | 1132 | 293 | KMR |
| DSM 16511 | | | | |
| Lactobacillus coryniformis KCTC 3535 | 850 | 1119 | 270 | KNK |
| Mycoplasma mobile 163K | 916 | 1236 | 321 | KNY |
| Flavobacterium branchiophilum FL-15 | 1182 | 1473 | 292 | KQK |
| Prevotella timonensis CRIS 5C-B1 | 957 | 1218 | 262 | KQQ |
| Methylosinus trichosporium OB3b | 830 | 1082 | 253 | KRP |
| Prevotella sp. C561 | 1099 | 1424 | 326 | KRY |
| Mycoplasma gallisepticum str. F | 911 | 1269 | 359 | KTA |
| Lactobacillus rhamnosus GG | 1077 | 1363 | 287 | KYG |
| Wolinella succinogenes DSM 1740 | 811 | 1059 | 249 | LPN |
| Streptococcus thermophilus LMD-9 | 1099 | 1388 | 290 | MLA |
| Treponema denticola ATCC 35405 | 1092 | 1395 | 304 | NDS |
| Bergeyella zoohelcum ATCC 43767 | 1098 | 1415 | 318 | NEK |
| Veillonella atypica ACS-134-V-Col7a | 1107 | 1398 | 292 | NGF |
| Neisseria meningitidis Z2491 | 835 | 1082 | 248 | NHN |
| Ignavibacterium album JCM 16511 | 1296 | 1688 | 393 | NKK |
| Ruminococcus albus 8 | 853 | 1156 | 304 | NNF |
| Streptococcus thermophilus LMD-9 | 811 | 1121 | 311 | NNK |
| Barnesiella intestinihominis YIT | 871 | 1153 | 283 | NPV |
| 11860 | | | | |
| Azospirillum sp. B510 | 911 | 1168 | 258 | PFH |
| Rhodospirillum rubrum ATCC 11170 | 863 | 1173 | 311 | PRG |
| Planococcus antarcticus DSM 14505 | 1087 | 1333 | 247 | PYY |
| Staphylococcus pseudintermedius | 1073 | 1334 | 262 | QIV |
| ED99 | | | | |
| Alcanivorax sp. W11-5 | 843 | 1113 | 271 | RIE |
| Bradyrhizobium sp. BTAi1 | 811 | 1064 | 254 | RIY |
| Streptococcus pyogenes M1 GAS | 1099 | 1368 | 270 | RKR |
| Streptococcus mutans UA159 | 1078 | 1345 | 268 | RKR |
| Streptococcus Pyogenes | 1099 | 1368 | 270 | RKR |
| Bacteroides sp. 20 3 | 1147 | 1517 | 371 | RNI |
| S. aureus | 772 | 1053 | 282 | RNK |
| Solobacterium moorei F0204 | 1062 | 1327 | 266 | RSG |
| Finegoldia magna ATCC 29328 | 1081 | 1348 | 268 | RTE |
| uncultured delta proteobacterium | 770 | 1011 | 242 | SGG |
| HF0070 07E19 | | | | |
| Acidaminococcus sp. D21 | 1064 | 1358 | 295 | SIG |
| Eubacterium rectale ATCC 33656 | 824 | 1114 | 291 | SKK |
| Caenispirillum salinarum AK4 | 1048 | 1442 | 395 | SLV |
| Acidothermus cellulolyticus 11B | 830 | 1138 | 309 | SPS |
| Catenibacterium mitsuokai DSM 15897 | 1068 | 1329 | 262 | SPT |
| Parvibaculum lavamentivorans DS-1 | 827 | 1037 | 211 | TGN |
| Staphylococcus lugdunensis | 772 | 1054 | 283 | TKK |
| M23590 | | | | |
| Streptococcus sanguinis SK49 | 1123 | 1421 | 299 | TRM |
| Elusimicrobium minutum Pei191 | 910 | 1195 | 286 | TTG |
| Nitrobacter hamburgensis X14 | 914 | 1166 | 253 | VAY |
| Mycoplasma synoviae 53 | 991 | 1314 | 324 | VGF |
| Sphaerochaeta globus str. Buddy | 877 | 1179 | 303 | VKG |
| Ilyobacter polytropus DSM 2926 | 837 | 1092 | 256 | VNG |
| Rhodovulum sp. PH10 | 821 | 1059 | 239 | VPY |
| Bifidobacterium longum DJO10A | 904 | 1187 | 284 | VRK |

### Nucleic Acids Encoding Cas9 Molecules

[1230] Nucleic acids encoding the Cas9 molecules or Cas9 polypeptides, e.g., an eaCas9 molecule or eaCas9 polypeptide, are provided herein.

[1231] Exemplary nucleic acids encoding Cas9 molecules or Cas9 polypeptides are described in Cong 2013; Wang 2013; Mali 2013; and Jinek 2012. Another exemplary nucleic acid encoding a Cas9 molecule or Cas9 polypeptide is shown in black in FIG. 8.

[1232] In an embodiment, a nucleic acid encoding a Cas9 molecule or Cas9 polypeptide can be a synthetic nucleic acid sequence. For example, the synthetic nucleic acid molecule can be chemically modified, e.g., as described in Section VIII. In an embodiment, the Cas9 mRNA has one or more (e.g., all of the following properties: it is capped, polyadenylated, substituted with 5-methylcytidine and/or pseudouridine.

[1233] In addition, or alternatively, the synthetic nucleic acid sequence can be codon optimized, e.g., at least one non-common codon or less-common codon has been replaced by a common codon. For example, the synthetic nucleic acid can direct the synthesis of an optimized messenger mRNA, e.g., optimized for expression in a mammalian expression system, e.g., described herein.

[1234] In addition, or alternatively, a nucleic acid encoding a Cas9 molecule or Cas9 polypeptide may comprise a nuclear localization sequence (NLS). Nuclear localization sequences are known in the art.

[1235] An exemplary codon optimized nucleic acid sequence encoding a Cas9 molecule of S. pyogenes is set forth in SEQ ID NO: 22. The corresponding amino acid sequence is set forth in SEQ ID NO: 2.

[1236] An exemplary codon optimized nucleic acid sequence encoding a Cas9 molecule of N. meningitidis is set forth in SEQ ID NO: 24. The corresponding amino acid sequence is set forth in SEQ ID NO: 25.

[1237] An amino acid sequence of a S. aureus Cas9 molecule is set forth in SEQ ID NO: 26. An exemplary codon optimized nucleic acid sequence encoding a Cas9 molecule of S. aureus is set forth in SEQ ID NO: 39.

[1238] If any of the above Cas9 sequences are fused with a peptide or polypeptide at the C-terminus, it is understood that the stop codon will be removed.

### Other Cas Molecules and Cas Polypeptides

[1239] Various types of Cas molecules or Cas polypeptides can be used to practice the inventions disclosed herein. In some embodiments, Cas molecules of Type II Cas systems are used. In other embodiments, Cas molecules of other Cas systems are used. For example, Type I or Type III Cas molecules may be used. Exemplary Cas molecules (and Cas systems) are described, e.g., in Haft 2005 and Makarova 2011, the contents of both references are incorporated herein by reference in their entirety. Exemplary Cas molecules (and Cas systems) are also shown in Table 17.

TABLE 17
Cas Systems

| | | | Structure | Families (and | |
|---|---|---|---|---|---|
| | System | | of encoded | superfamily) | |
| Gene | type or | Name from | protein (PDB | of encoded | |
| name^{‡} | subtype | Haft 2005^{§} | accessions)^{¶} | protein^{#}** | Representatives |
| cas1 | Type I | cas1 | 3GOD, | COG1518 | SERP2463, |
| | Type II | | 3LFX and | | SPy1047 and |
| | Type III | | 2YZS | | ygbT |
| cas2 | Type I | cas2 | 2IVY, 2I8E | COG1343 and | SERP2462, |
| | Type II | | and 3EXC | COG3512 | SPy1048, |
| | Type III | | | | SPy1723 (N- |
| | | | | | terminal domain) |
| | | | | | and ygbF |
| cas3′ | Type I^{‡‡} | cas3 | NA | COG1203 | APE1232 and |
| | | | | | ygcB |
| cas3″ | Subtype | NA | NA | COG2254 | APE1231 and |
| | I-A | | | | BH0336 |
| | Subtype | | | | |
| | I-B | | | | |
| cas4 | Subtype | cas4 and | NA | COG1468 | APE1239 and |
| | I-A | csa1 | | | BH0340 |
| | Subtype | | | | |
| | I-B | | | | |
| | Subtype | | | | |
| | I-C | | | | |
| | Subtype | | | | |
| | I-D | | | | |
| | Subtype | | | | |
| | II-B | | | | |
| cas5 | Subtype | cas5a, | 3KG4 | COG1688 | APE1234, |
| | I-A | cas5d, | | (RAMP) | BH0337, devS |
| | Subtype | cas5e, | | | and ygcI |
| | I-B | cas5h, | | | |
| | Subtype | cas5p, cas5t | | | |
| | I-C | and cmx5 | | | |
| | Subtype | | | | |
| | I-E | | | | |
| cas6 | Subtype | cas6 and | 3I4H | COG1583 and | PF1131 and |
| | I-A | cmx6 | | COG5551 | slr7014 |
| | Subtype | | | (RAMP) | |
| | I-B | | | | |
| | Subtype | | | | |
| | I-D | | | | |
| | Subtype | | | | |
| | III-A | | | | |
| | Subtype | | | | |
| | III-B | | | | |
| cas6e | Subtype | cse3 | 1WJ9 | (RAMP) | ygcH |
| | I-E | | | | |
| cas6f | Subtype | csy4 | 2XLJ | (RAMP) | y1727 |
| | I-F | | | | |
| cas7 | Subtype | csa2, csd2, | NA | COG1857 and | devR and ygcJ |
| | I-A | cse4, csh2, | | COG3649 | |
| | Subtype | csp1 and | | (RAMP) | |
| | I-B | cst2 | | | |
| | Subtype | | | | |
| | I-C | | | | |
| | Subtype | | | | |
| | I-E | | | | |
| cas8a1 | Subtype | cmx1, cst1, | NA | BH0338-like | LA3191^{§§} and |
| | I-A^{‡‡} | csx8, csx13 | | | PG2018^{§§} |
| | | and CXXC- | | | |
| | | CXXC | | | |
| cas8a2 | Subtype | csa4 and | NA | PH0918 | AF0070, AF1873, |
| | I-A^{‡‡} | csx9 | | | MJ0385, PF0637, |
| | | | | | PH0918 and |
| | | | | | SSO1401 |
| cas8b | Subtype | csh1 and | NA | BH0338-like | MTH1090 and |
| | I-B^{‡‡} | TM1802 | | | TM1802 |
| cas8c | Subtype | csd1 and | NA | BH0338-like | BH0338 |
| | I-C^{‡‡} | csp2 | | | |
| cas9 | Type II^{‡‡} | csn1 and | NA | COG3513 | FTN_0757 and |
| | | csx12 | | | SPy1046 |
| cas10 | Type III^{‡‡} | cmr2, csm1 | NA | COG1353 | MTH326, |
| | | and csx11 | | | Rv2823c^{§§} and |
| | | | | | TM1794^{§§} |
| cas10d | Subtype | csc3 | NA | COG1353 | slr7011 |
| | I-D^{‡‡} | | | | |
| csy1 | Subtype | csy1 | NA | y1724-like | y1724 |
| | I-F^{‡‡} | | | | |
| csy2 | Subtype | csy2 | NA | (RAMP) | y1725 |
| | I-F | | | | |
| csy3 | Subtype | csy3 | NA | (RAMP) | y1726 |
| | I-F | | | | |
| cse1 | Subtype | cse1 | NA | YgcL-like | ygcL |
| | I-E^{‡‡} | | | | |
| cse2 | Subtype | cse2 | 2ZCA | YgcK-like | ygcK |
| | I-E | | | | |
| csc1 | Subtype | csc1 | NA | alr1563-like | alr1563 |
| | I-D | | | (RAMP) | |
| csc2 | Subtype | csc1 and | NA | COG1337 | slr7012 |
| | I-D | csc2 | | (RAMP) | |
| csa5 | Subtype | csa5 | NA | AF1870 | AF1870, MJ0380, |
| | I-A | | | | PF0643 and |
| | | | | | SSO1398 |
| csn2 | Subtype | csn2 | NA | SPy1049-like | SPy1049 |
| | II-A | | | | |
| csm2 | Subtype | csm2 | NA | COG1421 | MTH1081 and |
| | III-A^{‡‡} | | | | SERP2460 |
| csm3 | Subtype | csc2 and | NA | COG1337 | MTH1080 and |
| | III-A | csm3 | | (RAMP) | SERP2459 |
| csm4 | Subtype | csm4 | NA | COG1567 | MTH1079 and |
| | III-A | | | (RAMP) | SERP2458 |
| csm5 | Subtype | csm5 | NA | COG1332 | MTH1078 and |
| | III-A | | | (RAMP) | SERP2457 |
| csm6 | Subtype | APE2256 | 2WTE | COG1517 | APE2256 and |
| | III-A | and csm6 | | | SSO1445 |
| cmr1 | Subtype | cmr1 | NA | COG1367 | PF1130 |
| | III-B | | | (RAMP) | |
| cmr3 | Subtype | cmr3 | NA | COG1769 | PF1128 |
| | III-B | | | (RAMP) | |
| cmr4 | Subtype | cmr4 | NA | COG1336 | PF1126 |
| | III-B | | | (RAMP) | |
| cmr5 | Subtype | cmr5 | 2ZOP and | COG3337 | MTH324 and |
| | III-B^{‡‡} | | 2OEB | | PF1125 |
| cmr6 | Subtype | cmr6 | NA | COG1604 | PF1124 |
| | III-B | | | (RAMP) | |
| csb1 | Subtype | GSU0053 | NA | (RAMP) | Balac_1306 and |
| | I-U | | | | GSU0053 |
| csb2 | Subtype | NA | NA | (RAMP) | Balac_1305 and |
| | I-U^{§§} | | | | GSU0054 |
| csb3 | Subtype | NA | NA | (RAMP) | Balac_1303^{§§} |
| | I-U | | | | |
| csx17 | Subtype | NA | NA | NA | Btus_2683 |
| | I-U | | | | |
| csx14 | Subtype | NA | NA | NA | GSU0052 |
| | I-U | | | | |
| csx10 | Subtype | csx10 | NA | (RAMP) | Caur_2274 |
| | I-U | | | | |
| csx16 | Subtype | VVA1548 | NA | NA | VVA1548 |
| | III-U | | | | |
| csaX | Subtype | csaX | NA | NA | SSO1438 |
| | III-U | | | | |
| csx3 | Subtype | csx3 | NA | NA | AF1864 |
| | III-U | | | | |
| csx1 | Subtype | csa3, csx1, | 1XMX and | COG1517 and | MJ1666, |
| | III-U | csx2, | 2I71 | COG4006 | NE0113, PF1127 |
| | | DXTHG, | | | and TM1812 |
| | | NE0113 and | | | |
| | | TIGR02710 | | | |
| csx15 | Unknown | NA | NA | TTE2665 | TTE2665 |
| csf1 | Type U | csf1 | NA | NA | AFE_1038 |
| csf2 | Type U | csf2 | NA | (RAMP) | AFE_1039 |
| csf3 | Type U | csf3 | NA | (RAMP) | AFE_1040 |
| csf4 | Type U | csf4 | NA | NA | AFE_1037 |

### V. Functional Analysis of Candidate Molecules

[1240] Candidate Cas9 molecules, candidate gRNA molecules, candidate Cas9 molecule/gRNA molecule complexes, can be evaluated by art-known methods or as described herein. For example, exemplary methods for evaluating the endonuclease activity of Cas9 molecule are described, e.g., in Jinek 2012.

### Binding and Cleavage Assay: Testing the Endonuclease Activity of Cas9 Molecule

[1241] The ability of a Cas9 molecule/gRNA molecule complex to bind to and cleave a target nucleic acid can be evaluated in a plasmid cleavage assay. In this assay, synthetic or in vitro-transcribed gRNA molecule is pre-annealed prior to the reaction by heating to 95° C. and slowly cooling down to room temperature. Native or restriction digest-linearized plasmid DNA (300 ng (˜8 nM)) is incubated for 60 min at 37° C. with purified Cas9 protein molecule (50-500 nM) and gRNA (50-500 nM, 1:1) in a Cas9 plasmid cleavage buffer (20 mM HEPES pH 7.5, 150 mM KCl, 0.5 mM DTT, 0.1 mM EDTA) with or without 10 mM MgCl₂. The reactions are stopped with 5×DNA loading buffer (30% glycerol, 1.2% SDS, 250 mM EDTA), resolved by a 0.8 or 1% agarose gel electrophoresis and visualized by ethidium bromide staining. The resulting cleavage products indicate whether the Cas9 molecule cleaves both DNA strands, or only one of the two strands. For example, linear DNA products indicate the cleavage of both DNA strands. Nicked open circular products indicate that only one of the two strands is cleaved.

[1242] Alternatively, the ability of a Cas9 molecule/gRNA molecule complex to bind to and cleave a target nucleic acid can be evaluated in an oligonucleotide DNA cleavage assay. In this assay, DNA oligonucleotides (10 μmol) are radiolabeled by incubating with 5 units T4 polynucleotide kinase and ˜3-6 pmol (˜20-40 mCi) [γ-32P]-ATP in 1×T4 polynucleotide kinase reaction buffer at 37° C. for 30 min, in a 50 μL reaction. After heat inactivation (65° C. for 20 min), reactions are purified through a column to remove unincorporated label. Duplex substrates (100 nM) are generated by annealing labeled oligonucleotides with equimolar amounts of unlabeled complementary oligonucleotide at 95° C. for 3 min, followed by slow cooling to room temperature. For cleavage assays, gRNA molecules are annealed by heating to 95° C. for 30 s, followed by slow cooling to room temperature. Cas9 (500 nM final concentration) is pre-incubated with the annealed gRNA molecules (500 nM) in cleavage assay buffer (20 mM HEPES pH 7.5, 100 mM KCl, 5 mM MgCl2, 1 mM DTT, 5% glycerol) in a total volume of 9 μl. Reactions are initiated by the addition of 1 μl target DNA (10 nM) and incubated for 1 h at 37° C. Reactions are quenched by the addition of 20 μl of loading dye (5 mM EDTA, 0.025% SDS, 5% glycerol in formamide) and heated to 95° C. for 5 min. Cleavage products are resolved on 12% denaturing polyacrylamide gels containing 7 M urea and visualized by phosphorimaging. The resulting cleavage products indicate that whether the complementary strand, the non-complementary strand, or both, are cleaved.

[1243] One or both of these assays can be used to evaluate the suitability of a candidate gRNA molecule or candidate Cas9 molecule.

### Binding Assay: Testing the Binding of Cas9 Molecule to Target DNA

[1244] Exemplary methods for evaluating the binding of Cas9 molecule to target DNA are described, e.g., in Jinek 2012.

[1245] For example, in an electrophoretic mobility shift assay, target DNA duplexes are formed by mixing of each strand (10 nmol) in deionized water, heating to 95° C. for 3 min and slow cooling to room temperature. All DNAs are purified on 8% native gels containing 1×TBE. DNA bands are visualized by UV shadowing, excised, and eluted by soaking gel pieces in DEPC-treated H₂O. Eluted DNA is ethanol precipitated and dissolved in DEPC-treated H₂O. DNA samples are 5′ end labeled with [γ-32P]-ATP using T4 polynucleotide kinase for 30 min at 37° C. Polynucleotide kinase is heat denatured at 65° C. for 20 min, and unincorporated radiolabel is removed using a column. Binding assays are performed in buffer containing 20 mM HEPES pH 7.5, 100 mM KCl, 5 mM MgCl₂, 1 mM DTT and 10% glycerol in a total volume of 10 μl. Cas9 protein molecule is programmed with equimolar amounts of pre-annealed gRNA molecule and titrated from 100 pM to 1 μM. Radiolabeled DNA is added to a final concentration of 20 pM. Samples are incubated for 1 h at 37° C. and resolved at 4° C. on an 8% native polyacrylamide gel containing 1×TBE and 5 mM MgCl₂. Gels are dried and DNA visualized by phosphorimaging.

### Differential Scanning Fluorimetry (DSF)

[1246] The thermostability of Cas9-gRNA ribonucleoprotein (RNP) complexes can be measured via DSF. This technique measures the thermostability of a protein, which can increase under favorable conditions such as the addition of a binding RNA molecule, e.g., a gRNA.

[1247] The assay is performed using two different protocols, one to test the best stoichiometric ratio of gRNA:Cas9 protein and another to determine the best solution conditions for RNP formation.

[1248] To determine the best solution to form RNP complexes, a 2 uM solution of Cas9 in water+10×SYPRO Orange® (Life Technologies cat #S-6650) and dispensed into a 384 well plate. An equimolar amount of gRNA diluted in solutions with varied pH and salt is then added. After incubating at room temperature for 10′ and brief centrifugation to remove any bubbles, a Bio-Rad CFX384™ Real-Time System C1000 Touch™ Thermal Cycler with the Bio-Rad CFX Manager software is used to run a gradient from 20° C. to 90° C. with a 1° increase in temperature every 10 seconds.

[1249] The second assay consists of mixing various concentrations of gRNA with 2 uM Cas9 in optimal buffer from assay 1 above and incubating at RT for 10′ in a 384 well plate. An equal volume of optimal buffer+10×SYPRO Orange® (Life Technologies cat #S-6650) is added and the plate sealed with Microseal® B adhesive (MSB-1001). Following brief centrifugation to remove any bubbles, a Bio-Rad CFX384™ Real-Time System C1000 Touch™ Thermal Cycler with the Bio-Rad CFX Manager software is used to run a gradient from 20° C. to 90° C. with a 1° increase in temperature every 10 seconds.

### VI. Genome Editing Approaches

[1250] While not wishing to be bound by theory, altering the LCA10 target position may be achieved using one of the approaches discussed herein.

### NHEJ Approaches for Gene Targeting

[1251] As described herein, nuclease-induced non-homologous end-joining (NHEJ) can be used to introduce indels at a target position. Nuclease-induced NHEJ can also be used to remove (e.g., delete) genomic sequence including the mutation at a target position in a gene of interest.

[1252] While not wishing to be bound by theory, it is believed that, in an embodiment, the genomic alterations associated with the methods described herein rely on nuclease-induced NHEJ and the error-prone nature of the NHEJ repair pathway. NHEJ repairs a double-strand break in the DNA by joining together the two ends; however, generally, the original sequence is restored only if two compatible ends, exactly as they were formed by the double-strand break, are perfectly ligated. The DNA ends of the double-strand break are frequently the subject of enzymatic processing, resulting in the addition or removal of nucleotides, at one or both strands, prior to rejoining of the ends. This results in the presence of insertion and/or deletion (indel) mutations in the DNA sequence at the site of the NHEJ repair.

[1253] The indel mutations generated by NHEJ are unpredictable in nature; however, at a given break site certain indel sequences are favored and are over represented in the population, likely due to small regions of microhomology. The lengths of deletions can vary widely; most commonly in the 1-50 bp range, but they can easily reach greater than 100-200 bp. Insertions tend to be shorter and often include short duplications of the sequence immediately surrounding the break site. However, it is possible to obtain large insertions, and in these cases, the inserted sequence has often been traced to other regions of the genome or to plasmid DNA present in the cells.

[1254] Because NHEJ is a mutagenic process, it can also be used to delete small sequence motifs as long as the generation of a specific final sequence is not required. If a double-strand break is targeted near to a short target sequence, the deletion mutations caused by the NHEJ repair often span, and therefore remove, the unwanted nucleotides. For the deletion of larger DNA segments, introducing two double-strand breaks, one on each side of the sequence, can result in NHEJ between the ends with removal of the entire intervening sequence. Both of these approaches can be used to delete specific DNA sequences; however, the error-prone nature of NHEJ may still produce indel mutations at the site of deletion.

[1255] Both double strand cleaving eaCas9 molecules and single strand, or nickase, eaCas9 molecules can be used in the methods and compositions described herein to generate break-induced indels.

### Double Strand Break

[1256] In an embodiment, double strand cleavage is effected by a Cas9 molecule having cleavage activity associated with an HNH-like domain and cleavage activity associated with a RuvC-like domain, e.g., an N-terminal RuvC-like domain, e.g., a wild type Cas9. Such embodiments require only a single gRNA.

### Single Strand Break

[1257] In other embodiments, two single strand breaks are effected by a Cas9 molecule having nickase activity, e.g., cleavage activity associated with an HNH-like domain or cleavage activity associated with an N-terminal RuvC-like domain. Such embodiments require two gRNAs, one for placement of each single strand break. In an embodiment, the Cas9 molecule having nickase activity cleaves the strand to which the gRNA hybridizes, but not the strand that is complementary to the strand to which the gRNA hybridizes. In an embodiment, the Cas9 molecule having nickase activity does not cleave the strand to which the gRNA hybridizes, but rather cleaves the strand that is complementary to the strand to which the gRNA hybridizes.

[1258] In an embodiment, the nickase has HNH activity, e.g., a Cas9 molecule having the RuvC activity inactivated, e.g., a Cas9 molecule having a mutation at D10, e.g., the D10A mutation. D10A inactivates RuvC therefore the Cas9 nickase has (only) HNH activity and will cut on the strand to which the gRNA hybridizes (the complementary strand, which does not have the NGG PAM on it). In other embodiments, a Cas9 molecule having an H840, e.g., an H840A, mutation can be used as a nickase. H840A inactivates HNH therefore the Cas9 nickase has (only) RuvC activity and cuts on the non-complementary strand (the strand that has the NGG PAM and whose sequence is identical to the gRNA). In other embodiments, a Cas9 molecule having an H863, e.g., an H863A, mutation can be used as a nickase. H863A inactivates HNH therefore the Cas9 nickase has (only) RuvC activity and cuts on the non-complementary strand (the strand that has the NGG PAM and whose sequence is identical to the gRNA).

[1259] In an embodiment, in which a nickase and two gRNAs are used to position two single strand breaks, one nick is on the + strand and one nick is on the − strand of the target nucleic acid. The PAMs can be outwardly facing. The gRNAs can be selected such that the gRNAs are separated by, from 0-50, 0-100, or 0-200 nucleotides. In an embodiment, there is no overlap between the target sequences that are complementary to the targeting domains of the two gRNAs. In an embodiment, the gRNAs do not overlap and are separated by as much as 50, 100, or 200 nucleotides. In an embodiment, the use of two gRNAs can increase specificity, e.g., by decreasing off-target binding (Ran 2013).

### Placement of Double Strand or Single Strand Breaks Relative to the Target Position

[1260] In an embodiment, in which a gRNA and Cas9 nuclease generate a double strand break for the purpose of inducing break-induced indels, a gRNA, e.g., a unimolecular (or chimeric) or modular gRNA molecule, is configured to position one double-strand break in close proximity to a nucleotide of the target position. In an embodiment, the cleavage site is between 0-40 bp away from the target position (e.g., less than 40, 35, 30, 25, 20, 15, 10, 9, 8, 7, 6, 5, 4, 3, 2 or 1 bp from the target position).

[1261] In an embodiment, in which two gRNAs complexing with a Cas9 nickase induce two single strand breaks for the purpose of introducing break-induced indels, two gRNAs, e.g., independently, unimolecular (or chimeric) or modular gRNA, are configured to position two single-strand breaks to provide for NHEJ-mediated alteration of a nucleotide of the target position. In an embodiment, the gRNAs are configured to position cuts at the same position, or within a few nucleotides of one another, on different strands, essentially mimicking a double strand break. In an embodiment, the two nicks are between 0-40 bp away from the target position (e.g., less than 40, 35, 30, 25, 20, 15, 10, 9, 8, 7, 6, 5, 4, 3, 2 or 1 bp from the target position) respectively, and the two single strand breaks are within 25-55 bp of each other (e.g., between 25 to 50, 25 to 45, 25 to 40, 25 to 35, 25 to 30, 50 to 55, 45 to 55, 40 to 55, 35 to 55, 30 to 55, 30 to 50, 35 to 50, 40 to 50, 45 to 50, 35 to 45, or 40 to 45 bp) and no more than 100 bp away from each other (e.g., no more than 90, 80, 70, 60, 50, 40, 30, 20 or 10 bp). In an embodiment, the gRNAs are configured to place a single strand break on either side of the target position. In an embodiment, the gRNAs are configured to place a single strand break on the same side (either 5′ or 3′) of the target position.

[1262] Regardless of whether a break is a double strand or a single strand break, the gRNA should be configured to avoid unwanted target chromosome elements, such as repeated elements, e.g., an Alu repeat, in the target domain. In addition, a break, whether a double strand or a single strand break, should be sufficiently distant from any sequence that should not be altered. For example, cleavage sites positioned within introns should be sufficiently distant from any intron/exon border, or naturally occurring splice signal, to avoid alteration of the exonic sequence or unwanted splicing events.

### Single-Strand Annealing

[1263] Single strand annealing (SSA) is another DNA repair process that repairs a double-strand break between two repeat sequences present in a target nucleic acid. Repeat sequences utilized by the SSA pathway are generally greater than 30 nucleotides in length. Resection at the break ends occurs to reveal repeat sequences on both strands of the target nucleic acid. After resection, single strand overhangs containing the repeat sequences are coated with RPA protein to prevent the repeats sequences from inappropriate annealing, e.g., to themselves. RAD52 binds to and each of the repeat sequences on the overhangs and aligns the sequences to enable the annealing of the complementary repeat sequences. After annealing, the single-strand flaps of the overhangs are cleaved. New DNA synthesis fills in any gaps, and ligation restores the DNA duplex. As a result of the processing, the DNA sequence between the two repeats is deleted. The length of the deletion can depend on many factors including the location of the two repeats utilized, and the pathway or processivity of the resection.

[1264] In contrast to HDR pathways, SSA does not require a template nucleic acid to alter or correct a target nucleic acid sequence. Instead, the complementary repeat sequence is utilized.

### Other DNA Repair Pathways

### SSBR (Single Strand Break Repair)

[1265] Single-stranded breaks (SSB) in the genome are repaired by the SSBR pathway, which is a distinct mechanism from the DSB repair mechanisms discussed above. The SSBR pathway has four major stages: SSB detection, DNA end processing, DNA gap filling, and DNA ligation. A more detailed explanation is given in Caldecott, Nature Reviews Genetics 9, 619-631 (August 2008), and a summary is given here.

[1266] In the first stage, when a SSB forms, PARP1 and/or PARP2 recognize the break and recruit repair machinery. The binding and activity of PARP1 at DNA breaks is transient and it seems to accelerate SSBr by promoting the focal accumulation or stability of SSBr protein complexes at the lesion. Arguably the most important of these SSBr proteins is XRCC1, which functions as a molecular scaffold that interacts with, stabilizes, and stimulates multiple enzymatic components of the SSBr process including the protein responsible for cleaning the DNA 3′ and 5′ ends. For instance, XRCC1 interacts with several proteins (DNA polymerase beta, PNK, and three nucleases, APE1, APTX, and APLF) that promote end processing. APE1 has endonuclease activity. APLF exhibits endonuclease and 3′ to 5′ exonuclease activities. APTX has endonuclease and 3′ to 5′ exonuclease activity.

[1267] This end processing is an important stage of SSBR since the 3′- and/or 5′-termini of most, if not all, SSBs are ‘damaged’. End processing generally involves restoring a damaged 3′-end to a hydroxylated state and and/or a damaged 5′ end to a phosphate moiety, so that the ends become ligation-competent. Enzymes that can process damaged 3′ termini include PNKP, APE1, and TDP1. Enzymes that can process damaged 5′ termini include PNKP, DNA polymerase beta, and APTX. LIG3 (DNA ligase III) can also participate in end processing. Once the ends are cleaned, gap filling can occur.

[1268] At the DNA gap filling stage, the proteins typically present are PARP1, DNA polymerase beta, XRCC1, FEN1 (flap endonuclease 1), DNA polymerase delta/epsilon, PCNA, and LIG1. There are two ways of gap filling, the short patch repair and the long patch repair. Short patch repair involves the insertion of a single nucleotide that is missing. At some SSBs, “gap filling” might continue displacing two or more nucleotides (displacement of up to 12 bases have been reported). FEN1 is an endonuclease that removes the displaced 5′-residues. Multiple DNA polymerases, including Pol β, are involved in the repair of SSBs, with the choice of DNA polymerase influenced by the source and type of SSB.

[1269] In the fourth stage, a DNA ligase such as LIG1 (Ligase I) or LIG3 (Ligase III) catalyzes joining of the ends. Short patch repair uses Ligase III and long patch repair uses Ligase I.

[1270] Sometimes, SSBR is replication-coupled. This pathway can involve one or more of CtIP, MRN, ERCC1, and FEN1. Additional factors that may promote SSBR include: aPARP, PARP1, PARP2, PARG, XRCC1, DNA polymerase b, DNA polymerase d, DNA polymerase e, PCNA, LIG1, PNK, PNKP, APE1, APTX, APLF, TDP1, LIG3, FEN1, CtIP, MRN, and ERCC1.

### MMR (Mismatch Repair)

[1271] Cells contain three excision repair pathways: MMR, BER, and NER. The excision repair pathways have a common feature in that they typically recognize a lesion on one strand of the DNA, then exo/endonucleases remove the lesion and leave a 1-30 nucleotide gap that is sub-sequentially filled in by DNA polymerase and finally sealed with ligase. A more complete picture is given in Li 2008, and a summary is provided here.

[1272] Mismatch repair (MMR) operates on mispaired DNA bases.

[1273] The MSH2/6 or MSH2/3 complexes both have ATPases activity that plays an important role in mismatch recognition and the initiation of repair. MSH2/6 preferentially recognizes base-base mismatches and identifies mispairs of 1 or 2 nucleotides, while MSH2/3 preferentially recognizes larger ID mispairs.

[1274] hMLH1 heterodimerizes with hPMS2 to form hMutLα which possesses an ATPase activity and is important for multiple steps of MMR. It possesses a PCNA/replication factor C (RFC)-dependent endonuclease activity which plays an important role in 3′ nick-directed MMR involving EXO1 (EXO1 is a participant in both HR and MMR). It regulates termination of mismatch-provoked excision. Ligase I is the relevant ligase for this pathway. Additional factors that may promote MMR include: EXO1, MSH2, MSH3, MSH6, MLH1, PMS2, MLH3, DNA Pol d, RPA, HMGB1, RFC, and DNA ligase I.

### Base Excision Repair (BER)

[1275] The base excision repair (BER) pathway is active throughout the cell cycle; it is responsible primarily for removing small, non-helix-distorting base lesions from the genome. In contrast, the related Nucleotide Excision Repair pathway (discussed in the next section) repairs bulky helix-distorting lesions. A more detailed explanation is given in Caldecott, Nature Reviews Genetics 9, 619-631 (August 2008), and a summary is given here.

[1276] Upon DNA base damage, base excision repair (BER) is initiated and the process can be simplified into five major steps: (a) removal of the damaged DNA base; (b) incision of the subsequent a basic site; (c) clean-up of the DNA ends; (d) insertion of the correct nucleotide into the repair gap; and (e) ligation of the remaining nick in the DNA backbone. These last steps are similar to the SSBR.

[1277] In the first step, a damage-specific DNA glycosylase excises the damaged base through cleavage of the N-glycosidic bond linking the base to the sugar phosphate backbone. Then AP endonuclease-1 (APE1) or bifunctional DNA glycosylases with an associated lyase activity incised the phosphodiester backbone to create a DNA single strand break (SSB). The third step of BER involves cleaning-up of the DNA ends. The fourth step in BER is conducted by Pol β that adds a new complementary nucleotide into the repair gap and in the final step XRCC1/Ligase III seals the remaining nick in the DNA backbone. This completes the short-patch BER pathway in which the majority (˜80%) of damaged DNA bases are repaired. However, if the 5′-ends in step 3 are resistant to end processing activity, following one nucleotide insertion by Pol β there is then a polymerase switch to the replicative DNA polymerases, Pol o/s, which then add ˜2-8 more nucleotides into the DNA repair gap. This creates a 5′-flap structure, which is recognized and excised by flap endonuclease-1 (FEN-1) in association with the processivity factor proliferating cell nuclear antigen (PCNA). DNA ligase I then seals the remaining nick in the DNA backbone and completes long-patch BER. Additional factors that may promote the BER pathway include: DNA glycosylase, APE1, Polb, Pold, Pole, XRCC1, Ligase III, FEN-1, PCNA, RECQL4, WRN, MYH, PNKP, and APTX.

### Nucleotide Excision Repair (NER)

[1278] Nucleotide excision repair (NER) is an important excision mechanism that removes bulky helix-distorting lesions from DNA. Additional details about NER are given in Marteijn 2014, and a summary is given here. NER a broad pathway encompassing two smaller pathways: global genomic NER (GG-NER) and transcription coupled repair NER (TC-NER). GG-NER and TC-NER use different factors for recognizing DNA damage. However, they utilize the same machinery for lesion incision, repair, and ligation.

[1279] Once damage is recognized, the cell removes a short single-stranded DNA segment that contains the lesion. Endonucleases XPF/ERCC1 and XPG (encoded by ERCC5) remove the lesion by cutting the damaged strand on either side of the lesion, resulting in a single-strand gap of 22-30 nucleotides. Next, the cell performs DNA gap filling synthesis and ligation. Involved in this process are: PCNA, RFC, DNA Pol δ, DNA Pol ε or DNA Pol κ, and DNA ligase I or XRCC1/Ligase III. Replicating cells tend to use DNA pol ε and DNA ligase I, while non-replicating cells tend to use DNA Pol δ, DNA Pol κ, and the XRCC1/Ligase III complex to perform the ligation step.

[1280] NER can involve the following factors: XPA-G, POLH, XPF, ERCC1, XPA-G, and LIG1. Transcription-coupled NER (TC-NER) can involve the following factors: CSA, CSB, XPB, XPD, XPG, ERCC1, and TTDA. Additional factors that may promote the NER repair pathway include XPA-G, POLH, XPF, ERCC1, XPA-G, LIG1, CSA, CSB, XPA, XPB, XPC, XPD, XPF, XPG, TTDA, UVSSA, USP7, CETN2, RAD23B, UV-DDB, CAK subcomplex, RPA, and PCNA.

### Interstrand Crosslink (ICL)

[1281] A dedicated pathway called the ICL repair pathway repairs interstrand crosslinks. Interstrand crosslinks, or covalent crosslinks between bases in different DNA strand, can occur during replication or transcription. ICL repair involves the coordination of multiple repair processes, in particular, nucleolytic activity, translesion synthesis (TLS), and HDR. Nucleases are recruited to excise the ICL on either side of the crosslinked bases, while TLS and HDR are coordinated to repair the cut strands. ICL repair can involve the following factors: endonucleases, e.g., XPF and RAD51C, endonucleases such as RAD51, translesion polymerases, e.g., DNA polymerase zeta and Rev1), and the Fanconi anemia (FA) proteins, e.g., FancJ.

### Other Pathways

[1282] Several other DNA repair pathways exist in mammals.

[1283] Translesion synthesis (TLS) is a pathway for repairing a single stranded break left after a defective replication event and involves translesion polymerases, e.g., DNA pol and Rev1.

[1284] Error-free postreplication repair (PRR) is another pathway for repairing a single stranded break left after a defective replication event.

Examples of gRNAs in Genome Editing Methods

[1285] gRNA molecules as described herein can be used with Cas9 molecules that cleave both or a single strand to alter the sequence of a target nucleic acid, e.g., of a target position or target genetic signature. gRNA molecules useful in these method are described below.

[1286] In an embodiment, the gRNA, e.g., a chimeric gRNA, molecule is configured such that it comprises one or more of the following properties;
[1287] a) it can position, e.g., when targeting a Cas9 molecule that makes double strand breaks, a double strand break (i) within 50, 100, 150 or 200 nucleotides of a target position, or (ii) sufficiently close that the target position is within the region of end resection;
[1288] b) it has a targeting domain of at least 17 nucleotides, e.g., a targeting domain of (i) 17, (ii) 18, or (iii) 20 nucleotides; and
[1289] c)
[1290] (i) the proximal and tail domain, when taken together, comprise at least 15, 18, 20, 25, 30, 31, 35, 40, 45, 49, 50, or 53 nucleotides, e.g., at least 15, 18, 20, 25, 30, 31, 35, 40, 45, 49, 50, or 53 nucleotides from a naturally occurring S. pyogenes, S. thermophilus, S. aureus, or N. meningitidis tail and proximal domain, or a sequence that differs by no more than 1, 2, 3, 4, 5; 6, 7, 8, 9 or 10 nucleotides therefrom;
[1291] (ii) there are at least 15, 18, 20, 25, 30, 31, 35, 40, 45, 49, 50, or 53 nucleotides 3′ to the last nucleotide of the second complementarity domain, e.g., at least 15, 18, 20, 25, 30, 31, 35, 40, 45, 49, 50, or 53 nucleotides from the corresponding sequence of a naturally occurring S. pyogenes, S. thermophilus, S. aureus, or N. meningitidis gRNA, or a sequence that differs by no more than 1, 2, 3, 4, 5; 6, 7, 8, 9 or 10 nucleotides therefrom;
[1292] (iii) there are at least 16, 19, 21, 26, 31, 32, 36, 41, 46, 50, 51, or 54 nucleotides 3′ to the last nucleotide of the second complementarity domain that is complementary to its corresponding nucleotide of the first complementarity domain, e.g., at least 16, 19, 21, 26, 31, 32, 36, 41, 46, 50, 51, or 54 nucleotides from the corresponding sequence of a naturally occurring S. pyogenes, S. thermophilus, S. aureus, or N. meningitidis gRNA, or a sequence that differs by no more than 1, 2, 3, 4, 5, 6, 7, 8, 9 or 10 nucleotides therefrom;
[1293] (iv) the tail domain is at least 10, 15, 20, 25, 30, 35 or 40 nucleotides in length, e.g., it comprises at least 10, 15, 20, 25, 30, 35 or 40 nucleotides from a naturally occurring S. pyogenes, S. thermophilus, S. aureus, or N. meningitidis tail domain; or, or a sequence that differs by no more than 1, 2, 3, 4, 5, 6, 7, 8, 9 or 10 nucleotides therefrom; or
[1294] (v) the tail domain comprises 15, 20, 25, 30, 35, 40 nucleotides or all of the corresponding portions of a naturally occurring tail domain, e.g., a naturally occurring S. pyogenes, S. thermophilus, S. aureus, or N. meningitidis tail domain.

[1295] In an embodiment, the gRNA molecule is configured such that it comprises properties: a(i); and b(i).

[1296] In an embodiment, the gRNA molecule is configured such that it comprises properties: a(i); and b(ii).

[1297] In an embodiment, the gRNA molecule is configured such that it comprises properties: a(i); and b(iii).

[1298] In an embodiment, the gRNA molecule is configured such that it comprises properties: a(ii); and b(i).

[1299] In an embodiment, the gRNA molecule is configured such that it comprises properties: a(ii); and b(ii).

[1300] In an embodiment, the gRNA molecule is configured such that it comprises properties: a(ii); and b(iii).

[1301] In an embodiment, the gRNA molecule is configured such that it comprises properties: b(i); and c(i).

[1302] In an embodiment, the gRNA molecule is configured such that it comprises properties: b(i); and c(ii).

[1303] In an embodiment, the gRNA molecule is configured such that it comprises properties: b(ii); and c(i).

[1304] In an embodiment, the gRNA molecule is configured such that it comprises properties: b(ii); and c(ii).

[1305] In an embodiment, the gRNA molecule is configured such that it comprises properties: b(iii); and c(i).

[1306] In an embodiment, the gRNA molecule is configured such that it comprises properties: b(iii); and c(ii).

[1307] In an embodiment, the gRNA is used with a Cas9 nickase molecule having HNH activity, e.g., a Cas9 molecule having the RuvC activity inactivated, e.g., a Cas9 molecule having a mutation at D10, e.g., the D10A mutation.

[1308] In an embodiment, the gRNA is used with a Cas9 nickase molecule having RuvC activity, e.g., a Cas9 molecule having the HNH activity inactivated, e.g., a Cas9 molecule having a mutation at H840, e.g., a H840A.

[1309] In an embodiment, the gRNA is used with a Cas9 nickase molecule having RuvC activity, e.g., a Cas9 molecule having the HNH activity inactivated, e.g., a Cas9 molecule having a mutation at H863, e.g., a H863A.

[1310] In an embodiment, a pair of gRNA molecules, e.g., a pair of chimeric gRNA molecules, comprising a first and a second gRNA molecule, is configured such that they comprises one or more of the following properties:
[1311] a) the first and second gRNA molecules position, e.g., when targeting a Cas9 molecule that makes single strand or double strand breaks:
   [1312] (i) as positioned by a first and second gRNA molecule described herein; or
   [1313] (ii) sufficiently close that the target position is altered when the break is repaired;
[1314] b) one or both, independently, has a targeting domain of at least 17 nucleotides, e.g., a targeting domain of (i) 17, (ii) 18, or (iii) 20 nucleotides; and
[1315] c) one or both, independently, has a the tail domain is (i) at least 10, 15, 20, 25, 30, 35 or 40 nucleotides in length or (ii) the tail domain comprises, 15, 20, 25, 30, 35, 40, or all of the corresponding portions of a naturally occurring tail domain, e.g., a naturally occurring S. pyogenes, S. aureus, or S. thermophilus tail domain.

[1316] In an embodiment, one or both of the gRNA molecules is configured such that it comprises properties: a(i); and b(i).

[1317] In an embodiment, one or both of the gRNA molecules is configured such that it comprises properties: a(i); and b(ii).

[1318] In an embodiment, one or both of the gRNA molecules is configured such that it comprises properties: a(i); and b(iii).

[1319] In an embodiment, one or both of the gRNA molecules is configured such that it comprises properties: a(ii); and b(i).

[1320] In an embodiment, one or both of the gRNA molecules is configured such that it comprises properties: a(ii); and b(ii).

[1321] In an embodiment, one or both of the gRNA molecules is configured such that it comprises properties: a(ii); and b(iii).

[1322] In an embodiment, one or both of the gRNA molecules is configured such that it comprises properties: b(i); and c(i).

[1323] In an embodiment, one or both of the gRNA molecules is configured such that it comprises properties: b(i); and c(ii).

[1324] In an embodiment, one or both of the gRNA molecules is configured such that it comprises properties: b(ii); and c(i).

[1325] In an embodiment, one or both of the gRNA molecules is configured such that it comprises properties: b(ii); and c(ii).

[1326] In an embodiment, one or both of the gRNA molecules is configured such that it comprises properties: b(iii); and c(i).

[1327] In an embodiment, one or both of the gRNA molecules is configured such that it comprises properties: b(iii); and c(ii).

[1328] In an embodiment the gRNA is used with a Cas9 nickase molecule having HNH activity, e.g., a Cas9 molecule having the RuvC activity inactivated, e.g., a Cas9 molecule having a mutation at D10, e.g., the D10A mutation.

[1329] In an embodiment, the gRNA is used with a Cas9 nickase molecule having RuvC activity, e.g., a Cas9 molecule having the HNH activity inactivated, e.g., a Cas9 molecule having a mutation at H840, e.g., a H840A.

[1330] In an embodiment the gRNA is used with a Cas9 nickase molecule having RuvC activity, e.g., a Cas9 molecule having the HNH activity inactivated, e.g., a Cas9 molecule having a mutation at H863, e.g., a H863A.

### Targets: Cells

[1331] Cas9 molecules and gRNA molecules, e.g., a Cas9 molecule/gRNA molecule complex, can be used to manipulate a cell, e.g., to edit a target nucleic acid, in a wide variety of cells.

[1332] In some embodiments, a cell is manipulated by altering one or more target genes, e.g., as described herein. In some embodiments, the expression of one or more target genes (e.g., one or more target genes described herein) is modulated, e.g., in vivo.

[1333] In an embodiment, the target cell is a retinal cell, e.g., a cell of the retinal pigment epithelium cell or a photoreceptor cell. In another embodiment, the target cell is a horizontal cell, a bipolar cell, an amacrine cell, or a ganglion cell. In an embodiment, the target cell is a cone photoreceptor cell or cone cell, a rod photoreceptor cell or rod cell, or a macular cone photoreceptor cell. In an exemplary embodiment, cone photoreceptors in the macula are targeted, i.e., cone photoreceptors in the macula are the target cells.

[1334] In an embodiment, the target cell is removed from the subject, the gene altered ex vivo, and the cell returned to the subject. In an embodiment, a photoreceptor cell is removed from the subject, the gene altered ex vivo, and the photoreceptor cell returned to the subject. In an embodiment, a cone photoreceptor cell is removed from the subject, the gene altered ex vivo, and the cone photoreceptor cell returned to the subject.

[1335] In an embodiment, the cells are induced pluripotent stem cells (iPS) cells or cells derived from iPS cells, e.g., iPS cells from the subject, modified to alter the gene and differentiated into retinal progenitor cells or retinal cells, e.g., retinal photoreceptors, and injected into the eye of the subject, e.g., subretinally, e.g., in the submacular region of the retina.

[1336] In an embodiment, the cells are targeted in vivo, e.g., by delivery of the components, e.g., a Cas9 molecule and a gRNA molecule, to the target cells. In an embodiment, the target cells are retinal pigment epithelium, photoreceptor cells, or a combination thereof. In an embodiment, AAV is used to deliver the components, e.g., a Cas9 molecule and a gRNA molecule, e.g., by transducing the target cells.

### VII. Delivery, Formulations and Routes of Administration

[1337] The components, e.g., a Cas9 molecule and gRNA molecule can be delivered, formulated, or administered in a variety of forms, see, e.g., Table 18. In an embodiment, one Cas9 molecule and two or more (e.g., 2, 3, 4, or more) different gRNA molecules are delivered, e.g., by an AAV vector. In an embodiment, the sequence encoding the Cas9 molecule and the sequence(s) encoding the two or more (e.g., 2, 3, 4, or more) different gRNA molecules are present on the same nucleic acid molecule, e.g., an AAV vector. When a Cas9 or gRNA component is delivered encoded in DNA the DNA will typically include a control region, e.g., comprising a promoter, to effect expression. Useful promoters for Cas9 molecule sequences include CMV, EFS, EF-1a, MSCV, PGK, CAG, hGRK1, hCRX, hNRL, and hRCVRN control promoters. In an embodiment, the promoter is a constitutive promoter. In another embodiment, the promoter is a tissue specific promoter. Exemplary promoter sequences are disclosed in Table 20. Useful promoters for gRNAs include H1, 7SK, and U6 promoters. Promoters with similar or dissimilar strengths can be selected to tune the expression of components. Sequences encoding a Cas9 molecule can comprise a nuclear localization signal (NLS), e.g., an SV40 NLS. In an embodiment, the sequence encoding a Cas9 molecule comprises at least two nuclear localization signals. In an embodiment a promoter for a Cas9 molecule or a gRNA molecule can be, independently, inducible, tissue specific, or cell specific. To detect the expression of a Cas9, an affinity tag can be used. Useful affinity tag sequences include, but are not limited to, 3xFlag tag, single Flag tag, HA tag, Myc tag or HIS tag. Exemplary affinity tag sequences are disclosed in Table 26. To regulate Cas9 expression, e.g., in mammalian cells, polyadenylation signals (poly(A) signals) can be used. Exemplary polyadenylation signals are disclosed in Table 27.

[1338] Table 18 provides examples of how the components can be formulated, delivered, or administered.

TABLE 18
Elements

| Cas9 | gRNA | |
|---|---|---|
| Molecule(s) | molecule(s) | Comments |
| DNA | DNA | In this embodiment a Cas9 |
| | | molecule, typically an eaCas9 |
| | | molecule, and a gRNA are |
| | | transcribed from DNA. In this |
| | | embodiment they are encoded |
| | | on separate molecules. |
| DNA | | In this embodiment a Cas9 |
| | | molecule, typically an eaCas9 |
| | | molecule, and a gRNA are |
| | | transcribed from DNA, here |
| | | from a single molecule. |
| DNA | RNA | In this embodiment a Cas9 |
| | | molecule, typically an eaCas9 |
| | | molecule, is transcribed from DNA. |
| mRNA | RNA | In this embodiment a Cas9 |
| | | molecule, typically an eaCas9 |
| | | molecule, is transcribed from DNA. |
| Protein | DNA | In this embodiment a Cas9 |
| | | molecule, typically an eaCas9 |
| | | molecule, is provided as a |
| | | protein. A gRNA is transcribed |
| | | from DNA. |
| Protein | RNA | In this embodiment an eaCas9 |
| | | molecule is provided as a |
| | | protein. |

[1339] Table 19 summarizes various delivery methods for the components of a Cas system, e.g., the Cas9 molecule component and the gRNA molecule component, as described herein.

TABLE 19

| | | Delivery into | | | Type of |
|---|---|---|---|---|---|
| | | Non-Dividing | Duration of | Genome | Molecule |
| Delivery Vector/Mode | | Cells | Expression | Integration | Delivered |
| Physical (e.g., electroporation, | | YES | Transient | NO | Nucleic Acids |
| particle gun, Calcium | | | | | and Proteins |
| Phosphate transfection) | | | | | |
| Viral | Retrovirus | NO | Stable | YES | RNA |
| | Lentivirus | YES | Stable | YES/NO with | RNA |
| | | | | modifications | |
| | Adenovirus | YES | Transient | NO | DNA |
| | Adeno-Associated | YES | Stable | NO | DNA |
| | Virus (AAV) | | | | |
| | Vaccinia Virus | YES | Very Transient | NO | DNA |
| | Herpes Simplex | YES | Stable | NO | DNA |
| | Virus | | | | |
| Non-Viral | Cationic | YES | Transient | Depends on | Nucleic Acids |
| | Liposomes | | | what is | and Proteins |
| | | | | delivered | |
| | Polymeric | YES | Transient | Depends on | Nucleic Acids |
| | Nanoparticles | | | what is | and Proteins |
| | | | | delivered | |
| Biological | Attenuated | YES | Transient | NO | Nucleic Acids |
| Non-Viral | Bacteria | | | | |
| Delivery | Engineered | YES | Transient | NO | Nucleic Acids |
| Vehicles | Bacteriophages | | | | |
| | Mammalian | YES | Transient | NO | Nucleic Acids |
| | Virus-like | | | | |
| | Particles | | | | |
| | Biological | YES | Transient | NO | Nucleic Acids |
| | liposomes: | | | | |
| | Erythrocyte | | | | |
| | Ghosts and | | | | |
| | Exosomes | | | | |

[1340] Table 20 describes exemplary promoter sequences that can be used in AAV vectors, e.g., for Cas9 expression.

TABLE 20
Cas9 Promoter Sequences

| Promoter | Length (bp) | DNA Sequence |
|---|---|---|
| CMV | 617 | SEQ ID NO: 401 |
| EFS | 252 | SEQ ID NO: 402 |
| Human GRK1 | 292 | SEQ ID NO: 403 |
| (rhodopsin kinase) | | |
| Human CRX (cone | 113 | SEQ ID NO: 404 |
| rod homeobox | | |
| transcription factor) | | |
| Human NRL (neural | 281 | SEQ ID NO: 405 |
| retina leucine zipper | | |
| transcription factor | | |
| enhance upstream of | | |
| the human TK | | |
| terminal promoter) | | |
| Human RCVRN | 235 | SEQ ID NO: 406 |
| (recoverin) | | |

[1341] Table 26 describes exemplary affinity tag sequences that can be used in AAV vectors, e.g., for Cas9 expression.

TABLE 26

| Affinity tag | Amino Acid Sequence |
|---|---|
| 3XFlag tag | DYKDHDGDYKDHDIDYKDDDDK |
| | (SEQ ID NO: 426) |
| Flag tag | DYKDDDDK (SEQ ID NO: 451) |
| (single) | |
| HA tag | YPYDVPDYA (SEQ ID NO: 452) |
| Myc tag | EQKLISEEDL (SEQ ID NO: 453) |
| HIS tag | HHHHHH (SEQ ID NO: 454) |

[1342] Table 27 describes exemplary polyadenylation (polyA) sequences that can be used in AAV vectors, e.g., for Cas9 expression.

TABLE 27
Exemplary PolyA Sequences

| PolyA | DNA sequence |
|---|---|
| Mini polyA | SEQ ID NO: 424 |
| bGH polyA | SEQ ID NO: 455 |
| SV40 polyA | SEQ ID NO: 456 |

[1343] Table 25 describes exemplary Inverted Terminal Repeat (ITR) sequences that can be used in AAV vectors.

TABLE 25
Sequences of ITRs from Exemplary AAV Serotypes

| AAV Serotype | Left ITR Sequence | Right ITR Sequence |
|---|---|---|
| AAV1 | SEQ ID NO: 407 | SEQ ID NO: 436 |
| AAV2 | SEQ ID NO: 408 | SEQ ID NO: 437 |
| AAV3B | SEQ ID NO: 409 | SEQ ID NO: 438 |
| AAV4 | SEQ ID NO: 410 | SEQ ID NO: 439 |
| AAV5 | SEQ ID NO: 411 | SEQ ID NO: 440 |
| AAV6 | SEQ ID NO: 412 | SEQ ID NO: 441 |
| AAV7 | SEQ ID NO: 413 | SEQ ID NO: 442 |
| AAV8 | SEQ ID NO: 414 | SEQ ID NO: 443 |
| AAV9 | SEQ ID NO: 415 | SEQ ID NO: 444 |

[1344] Additional exemplary sequences for the recombinant AAV genome components described herein are provided below.

[1345] Exemplary left and right ITR sequences are provided in Table 25 (SEQ ID NOS: 407-415 and 436-444).

Exemplary spacer 1 sequence:
(SEQ ID NO: 416)
CAGATCTGAATTCGGTACC.
Exemplary U6 promoter sequence:
(SEQ ID NO: 417)
AAGGTCGGGCAGGAAGAGGGCCTATTTCCCATGATTCCTTCATAT
TTGCATATACGATACAAGGCTGTTAGAGAGATAATTAGAATTAAT
TTGACTGTAAACACAAAGATATTAGTACAAAATACGTGACGTAGA
AAGTAATAATTTCTTGGGTAGTTTGCAGTTTTAAAATTATGTTTT
AAAATGGACTATCATATGCTTACCGTAACTTGAAAGTATTTCGAT
TTCTTGGCTTTATATATCTTGTGGAAAGGACGAAACACC

[1346] Exemplary gRNA targeting domain sequences are described herein, e.g., in Tables 2A-2D, Tables 3A-3C, Tables 4A-4D, Tables 5A-5D, Tables 6A-6B, Tables 7A-7D, Tables 8A-8D, Tables 9A-9E, Tables 10A-10B, or Table 11.

Exemplary gRNA scaffold domain sequence:
(SEQ ID NO: 418)
GTTTTAGTACTCTGGAAACAGAATCTACTAAAACAAGGCAAAATG
CCGTGTTTATCTCGTCAACTTGTTGGCGAGATTTTTT.
Exemplary spacer 2 domain sequence:
(SEQ ID NO: 419)
GGTACCGCTAGCGCTTAAGTCGCGATGTACGGGCCAGATATACGC
GTTGA.
Exemplary Polymerase II promoter sequences
are provided in Table 20.
Exemplary N-ter NLS nucleotide sequence:
(SEQ ID NO: 420)
CCGAAGAAAAAGCGCAAGGTCGAAGCGTCC
Exemplary N-ter NLS amino acid sequence:
(SEQ ID NO: 434)
PKKKRKV

[1347] Exemplary S. aureus Cas9 nucleotide sequence set forth in SEQ ID NO: 39.

[1348] Exemplary S. aureus Cas9 amino acid sequence set forth in SEQ ID NO: 26.

Exemplary C-ter NLS sequence:
(SEQ ID NO: 422)
CCCAAGAAGAAGAGGAAAGTC.
Exemplary C-ter NLS amino acid sequence:
(SEQ ID NO: 434)
PKKKRKV
Exemplary poly(A) signal sequence:
(SEQ ID NO: 424)
TAGCAATAAAGGATCGTTTATTTTCATTGGAAGCGTGTGTTGGTT
TTTTGATCAGGCGCG.
Exemplary Spacer 3 sequence:
(SEQ ID NO: 425)
TCCAAGCTTCGCAGGAAAGAACATGTGAGCAAAAGGCCAGCAAAA
GGCGTTAACTCTAGATTTAAATGCATGCTGGGGAGAGATCT
Exemplary 3xFLAG nucleotide sequence:
(SEQ ID NO: 423)
GACTACAAAGACCATGACGGTGATTATAAAGATCATGACATCGAT
TACAAGGATGACGATGACAAG.
Exemplary 3xFLAG amino acid sequence:
(SEQ ID NO: 426)
DYKDHDGDYKDHDIDYKDDDDK
Exemplary Spacer 4 sequence:
(SEQ ID NO: 427)
CGACTTAGTTCGATCGAAGG.

[1349] Exemplary recombinant AAV genome sequences are provided in FIGS. 19A-24F (SEQ ID NOs: 428-433 and 445-450). Exemplary sequences of the recombinant AAV genome components (e.g., one or more of the components described above) are also shown in FIGS. 19A-24F (SEQ ID NOs: 428-433 and 445-450).

[1350] In certain aspects, the present disclosure focuses on AAV vectors encoding CRISPR/Cas9 genome editing systems, and on the use of such vectors to treat CEP290 associated disease. Exemplary AAV vector genomes are schematized in FIGS. 25A through 25D, which illustrate certain fixed and variable elements of these vectors: inverted terminal repeats (ITRs), one or two gRNA sequences and promoter sequences to drive their expression, a Cas9 coding sequence and another promoter to drive its expression. Each of these elements is discussed in detail below.

[1351] Turning first to the gRNA pairs utilized in the nucleic acids or AAV vectors of the present disclosure, one of three “left” or “upstream” guides may be used to cut upstream (between exon 26 and the IVS26 mutation), and one of three “right” or “downstream” guides is used to cut downstream (between the IVS26 mutation and exon 27). Targeting domain sequences of these guides (both DNA and RNA sequences) are presented in Table 28, below:

TABLE 28
Upstream (left) and Downstream (right) gRNA Targeting Domain
Sequences
Upstream (left) guides

| SEQ | | SEQ | |
|---|---|---|---|
| ID | | ID | |
| NO: | DNA | NO: | RNA |
| 389 | GTTCTGTCCTCAGTAAAAGGTA | 530 | GUUCUGUCCUCAGUAAAAGGUA |
| 390 | GAATAGTTTGTTCTGGGTAC | 468 | GAAUAGUUUGUUCUGGGUAC |
| 391 | GAGAAAGGGATGGGCACTTA | 538 | GAGAAAGGGAUGGGCACUUA |

Downstream (right) guides

| SEQ | | SEQ | |
|---|---|---|---|
| ID | | ID | |
| NO: | DNA | NO: | RNA |
| 388 | GTCAAAAGCTACCGGTTACCTG | 558 | GUCAAAAGCUACCGGUUACCUG |
| 392 | GATGCAGAACTAGTGTAGAC | 460 | GAUGCAGAACUAGUGUAGAC |
| 394 | GAGTATCTCCTGTTTGGCA | 568 | GAGUAUCUCCUGUUUGGCA |

[1352] The left and right guides can be used in any combination, though certain combinations may be more suitable for certain applications. Table 29 sets forth several upstream+downstream guide pairs used in the embodiments of this disclosure. It should be noted, notwithstanding the use of “left” and “right” as nomenclature for gRNAs, that any guide in a pair, upstream or downstream, may be placed in either one of the gRNA coding sequence positions illustrated in FIG. 25.

TABLE 29
Upstream (Left) + Downstream
(Right) Guide Pairs by SEQ ID NO.

| | | Downstream | | |
|---|---|---|---|---|
| | | 388 | 392 | 394 |
| Upstream | 389 | 389 + 388 | 389 + 392 | 389 + 394 |
| | 390 | 390 + 388 | 390 + 392 | 390 + 394 |
| | 391 | 391 + 388 | 391 + 392 | 391 + 394 |

| | | Downstream | | |
|---|---|---|---|---|
| | | 558 | 460 | 568 |
| Upstream | 530 | 530 + 558 | 530 + 460 | 530 + 568 |
| | 468 | 468 + 558 | 468 + 460 | 468 + 568 |
| | 538 | 538 + 558 | 538 + 460 | 538 + 568 |

[1353] In some embodiments, the gRNAs used in the present disclosure are derived from S. aureus gRNAs and can be unimolecular or modular, as described below. An exemplary unimolecular S. aureus gRNA is shown in FIG. 18B, and exemplary DNA and RNA sequences corresponding to unimolecular S. aureus gRNAs are shown below:

DNA:
(SEQ ID NO: 2785)
[N]₁₆₋₂₄GTTTTAGTACTCTGGAAACAGAATCTACTAAAACAAGGCAAAA
TGCCGTGTTTATCTCGTCAACTTGTTGGCGAGATTTTTT
and
RNA:
(SEQ ID NO: 2779)
[N]₁₆₋₂₄GUUUUAGUACUCUGGAAACAGAAUCUACUAAAACAAGGCAAAA
UGCCGUGUUUAUCUCGUCAACUUGUUGGCGAGAUUUUUU.
DNA:
(SEQ ID NO: 2787)
[N]₁₆₋₂₄GTTATAGTACTCTGGAAACAGAATCTACTATAACAAGGCAAAA
TGCCGTGTTTATCTCGTCAACTTGTTGGCGAGATTTTTT
and
RNA:
(SEQ ID NO: 2786)
[N]₁₆₋₂₄GUUAUAGUACUCUGGAAACAGAAUCUACUAUAACAAGGCAAA
AUGCCGUGUUUAUCUCGUCAACUUGUUGGCGAGAUUUUUU.

[1354] It should be noted that, while the figure depicts a targeting domain of 20 nucleotides, the targeting domain can have any suitable length. gRNAs used in the various embodiments of this disclosure preferably include targeting domains of between 16 and 24 (inclusive) bases in length at their 5′ ends, and optionally include a 3′ U6 termination sequence as illustrated.

[1355] The gRNA in FIG. 18B is depicted as unimolecular, but in some instances modular guides can be used. In the exemplary unimolecular gRNA sequences above, a 5′ portion corresponding to a crRNA (underlined) is connected by a GAAA linker to a 3′ portion corresponding to a tracrRNA (double underlined). Skilled artisans will appreciate that two-part modular gRNAs can be used that correspond to the underlined and double underlined sections.

[1356] Either one of the gRNAs presented above can be used with any of targeting sequences SEQ ID NOs: 389-391, 388, 392, or 394, and two gRNAs in a pair do not necessarily include the same backbone sequence. Additionally, skilled artisans will appreciate that the exemplary gRNA designs set forth herein can be modified in a variety of ways, which are described below or are known in the art; the incorporation of such modifications is within the scope of this disclosure.

[1357] Expression of each of the gRNAs in the AAV vector is driven by a pair of U6 promoters, such as a human U6 promoter. An exemplary U6 promoter sequence, as set forth in Maeder, is SEQ ID NO: 417.

[1358] Turning next to Cas9, in some embodiments the Cas9 protein is S. aureus Cas9. In further embodiments of this disclosure an S. aureus Cas9 sequence is modified to include two nuclear localization sequences (NLSs) at the C- and N-termini of the Cas9 protein, and a mini-polyadenylation signal (or Poly-A sequence). Exemplary S. aureus Cas9 sequences are provided as SEQ ID NO: 39 (i.e., codon-optimized S. aureus Cas9 nucleotide sequence) and SEQ ID NO: 26 (i.e., S. aureus Cas9 protein sequence). These sequences are exemplary in nature, and are not intended to be limiting. The skilled artisan will appreciate that modifications of these sequences may be possible or desirable in certain applications; such modifications are described below, or are known in the art, and are within the scope of this disclosure.

[1359] Skilled artisans will also appreciate that polyadenylation signals are widely used and known in the art, and that any suitable polyadenylation signal can be used in the embodiments of this disclosure. One exemplary polyadenylation signal is set forth in SEQ ID NO: 424.

[1360] Cas9 expression is driven, in certain vectors of this disclosure, by one of three promoters: cytomegalovirus (CMV) (i.e., SEQ ID NO: 401), elongation factor-1 (EFS) (i.e., SEQ ID NO: 402), or human g-protein receptor coupled kinase-1 (hGRK1) (i.e., SEQ ID NO: 403), which is specifically expressed in retinal photoreceptor cells. Modifications of the sequences of the promoters may be possible or desirable in certain applications, and such modifications are within the scope of this disclosure.

[1361] AAV genomes according to the present disclosure generally incorporate inverted terminal repeats (ITRs) derived from the AAV2 serotype. Exemplary left and right ITRs are SEQ ID NO: 408 (AAV2 Left ITR) and SEQ ID NO: 437 (AAV2 Right ITR), respectively. It should be noted, however, that numerous modified versions of the AAV2 ITRs are used in the field, and the ITR sequences shown below are exemplary and are not intended to be limiting. Modifications of these sequences are known in the art, or will be evident to skilled artisans, and are thus included in the scope of this disclosure.

[1362] As FIG. 25 illustrates, the gRNA pairs and the Cas9 promoter are variable and can be selected from the lists presented above. For clarity, this disclosure encompasses nucleic acids and/or AAV vectors comprising any combination of these elements, though certain combinations may be preferred for certain applications. Accordingly, in various embodiments of this disclosure, a nucleic acid or AAV vector encodes a CMV promoter for the Cas9, and gRNAs comprising targeting domains according to SEQ ID NOs: 389 and 388 (RNA sequences are SEQ ID NOs: 530 and 558, respectively); a CMV promoter and gRNAs comprising targeting domains according to SEQ ID NOs: 389 and 392 (RNA sequences are SEQ ID NOs: 530 and 460, respectively); a CMV promoter and gRNAs comprising targeting domains according to SEQ ID NOs: 389 and 394 (RNA sequences are SEQ ID NOs: 530 and 568, respectively); a CMV promoter and gRNAs comprising targeting domains according to SEQ ID NOs: 390 and 388 (RNA sequences are SEQ ID NOs: 468 and 558, respectively); a CMV promoter and gRNAs comprising targeting domains according to SEQ ID NOs: 390 and 392 (RNA sequences are SEQ ID NOs: 468 and 460, respectively); a CMV promoter and gRNAs comprising targeting domains according to SEQ ID NOs: 390 and 394 (RNA sequences are SEQ ID NOs: 468 and 568, respectively); a CMV promoter and gRNAs comprising targeting domains according to SEQ ID NOs: 391 and 388 (RNA sequences are SEQ ID NOs: 538 and 558, respectively); a CMV promoter and gRNAs comprising targeting domains according to SEQ ID NOs: 391 and 392 (RNA sequences are SEQ ID NOs: 538 and 460, respectively); a CMV promoter and gRNAs comprising targeting domains according to SEQ ID NOs: 391 and 394 (RNA sequences are SEQ ID NOs: 538 and 568, respectively); an EFS promoter and gRNAs comprising targeting domains according to SEQ ID NOs: 389 and 388 (RNA sequences are SEQ ID NOs: 530 and 558, respectively); an EFS promoter and gRNAs comprising targeting domains according to SEQ ID NOs: 389 and 392 (RNA sequences are SEQ ID NOs: 530 and 460, respectively); an EFS promoter and gRNAs comprising targeting domains according to SEQ ID NOs: 389 and 394 (RNA sequences are SEQ ID NOs: 530 and 568, respectively); an EFS promoter and gRNAs comprising targeting domains according to SEQ ID NOs: 390 and 388 (RNA sequences are SEQ ID NOs: 468 and 558, respectively); an EFS promoter and gRNAs comprising targeting domains according to SEQ ID NOs: 390 and 392 (RNA sequences are SEQ ID NOs: 468 and 460, respectively); an EFS promoter and gRNAs comprising targeting domains according to SEQ ID NOs: 390 and 394 (RNA sequences are SEQ ID NOs: 468 and 568, respectively); an EFS promoter and gRNAs comprising targeting domains according to SEQ ID NOs: 391 and 388 (RNA sequences are SEQ ID NOs: 538 and 558, respectively); an EFS promoter and gRNAs comprising targeting domains according to SEQ ID NOs: 391 and 392 (RNA sequences are SEQ ID NOs: 538 and 460, respectively); an EFS promoter and gRNAs comprising targeting domains according to SEQ ID NOs: 391 and 394 (RNA sequences are SEQ ID NOs: 538 and 568, respectively); an hGRK1 promoter and gRNAs comprising targeting domains according to SEQ ID NOs: 389 and 388 (RNA sequences are SEQ ID NOs: 530 and 558, respectively); an hGRK1 promoter and gRNAs comprising targeting domains according to SEQ ID NOs: 389 and 392 (RNA sequences are SEQ ID NOs: 530 and 460, respectively); an hGRK1 promoter and gRNAs comprising targeting domains according to SEQ ID NOs: 389 and 394 (RNA sequences are SEQ ID NOs: 530 and 568, respectively); an hGRK1 promoter and gRNAs comprising targeting domains according to SEQ ID NOs: 390 and 388 (RNA sequences are SEQ ID NOs: 468 and 558, respectively); an hGRK1 promoter and gRNAs comprising targeting domains according to SEQ ID NOs: 390 and 392 (RNA sequences are SEQ ID NOs: 468 and 460, respectively); an hGRK1 promoter and gRNAs comprising targeting domains according to SEQ ID NOs: 390 and 394 (RNA sequences are SEQ ID NOs: 468 and 568, respectively); an hGRK1 promoter and gRNAs comprising targeting domains according to SEQ ID NOs: 391 and 388 (RNA sequences are SEQ ID NOs: 538 and 558, respectively); an hGRK1 promoter and gRNAs comprising targeting domains according to SEQ ID NOs: 391 and 392 (RNA sequences are SEQ ID NOs: 538 and 460, respectively); or an hGRK1 promoter and gRNAs comprising targeting domains according to SEQ ID NOs: 391 and 394 (RNA sequences are SEQ ID NOs: 538 and 568, respectively).

[1363] In various embodiments, the nucleic acid or AAV vector encodes the following: left and right AAV2 ITR sequences, a first U6 promoter to drive expression of a first guide RNA having a sequence selected from SEQ ID NOs: 2785 and 2787 and/or comprising a targeting domain sequence according to one of SEQ ID NOs: 389-391, a second U6 promoter to drive expression of a second guide RNA comprising a sequence selected from SEQ ID NOs: 2785 and 2787 and/or comprising a targeting domain sequence according to one of SEQ ID NOs: 388, 392, and 394, and a CMV promoter to drive expression of an S. aureus Cas9 encoded by SEQ ID NO: 39; or left and right AAV2 ITR sequences, a first U6 promoter to drive expression of a first guide RNA having a sequence selected from SEQ ID NOs: 2785 or 2787 and/or comprising a targeting domain sequence according to one of SEQ ID NOs: 389-391, a second U6 promoter to drive expression of a second guide RNA comprising a sequence selected from SEQ ID NOs: 2785 and 2787 and/or comprising a targeting domain sequence according to one of SEQ ID NOs: 388, 392, and 394, and an hGRK promoter to drive expression of an S. aureus Cas9 encoded by SEQ ID NO: 39; or left and right AAV2 ITR sequences, a first U6 promoter to drive expression of a first guide RNA having a sequence selected from SEQ ID NOs: 2785 and 2787 and/or comprising a targeting domain sequence according to one of SEQ ID NOs: 389-391, a second U6 promoter to drive expression of a second guide RNA comprising a sequence selected from SEQ ID NOs: 2785 or 2787 and/or comprising a targeting domain sequence according to one of SEQ ID NOs: 388, 392, and 394, and an EFS promoter to drive expression of an S. aureus Cas9 encoded by SEQ ID NO: 39.

[1364] As shown in FIG. 25D, the nucleic acid or AAV vector may also comprise a Simian virus 40 (SV40) splice donor/splice acceptor (SD/SA) sequence element. In certain embodiments, the SV40 SD/SA element may be positioned between the GRK1 promoter and the Cas9 gene. In certain embodiments, a Kozak consensus sequence may precede the start codon of Cas9 to ensure robust Cas9 expression.

[1365] In some embodiments, the nucleic acid or AAV vector shares at least 80%, 85%, 90%, 95%, 96%, 97%, 98%, 99% or greater sequence identity with one of the nucleic acids or AAV vectors recited above.

[1366] It should be noted that these sequences described above are exemplary, and can be modified in ways that do not disrupt the operating principles of elements they encode. Such modifications, some of which are discussed below, are within the scope of this disclosure. Without limiting the foregoing, skilled artisans will appreciate that the DNA, RNA or protein sequences of the elements of this disclosure may be varied in ways that do not interrupt their function, and that a variety of similar sequences that are substantially similar (e.g., greater than 90%, 95%, 96%, 97%, 98% or 99% sequence similarity, or in the case of short sequences such as gRNA targeting domains, sequences that differ by no more than 1, 2 or 3 nucleotides) can be utilized in the various systems, methods and AAV vectors described herein. Such modified sequences are within the scope of this disclosure.

[1367] The AAV genomes described above can be packaged into AAV capsids (for example, AAV5 capsids), which capsids can be included in compositions (such as pharmaceutical compositions) and/or administered to subjects. An exemplary pharmaceutical composition comprising an AAV capsid according to this disclosure can include a pharmaceutically acceptable carrier such as balanced saline solution (BSS) and one or more surfactants (e.g., Tween20) and/or a thermosensitive or reverse-thermosensitive polymer (e.g., pluronic). Other pharmaceutical formulation elements known in the art may also be suitable for use in the compositions described here.

[1368] Compositions comprising AAV vectors according to this disclosure can be administered to subjects by any suitable means, including without limitation injection, for example, subretinal injection. The concentration of AAV vector within the composition is selected to ensure, among other things, that a sufficient AAV dose is administered to the retina of the subject, taking account of dead volume within the injection apparatus and the relatively limited volume that can be safely administered to the retina. Suitable doses may include, for example, 1×10¹¹ viral genomes (vg)/mL, 2×10¹¹ viral genomes (vg)/mL, 3×10¹¹ viral genomes (vg)/mL, 4×10¹¹ viral genomes (vg)/mL, 5×10¹¹ viral genomes (vg)/mL, 6×10¹¹ viral genomes (vg)/mL, 7×10¹¹ viral genomes (vg)/mL, 8×10¹¹ viral genomes (vg)/mL, 9×10¹¹ viral genomes (vg)/mL, 1×10¹² vg/mL, 2×10¹² viral genomes (vg)/mL, 3×10¹² viral genomes (vg)/mL, 4×10¹² viral genomes (vg)/mL, 5×10¹² viral genomes (vg)/mL, 6×10¹² viral genomes (vg)/mL, 7×10¹² viral genomes (vg)/mL, 8×10¹² viral genomes (vg)/mL, 9×10¹² viral genomes (vg)/mL, 1×10¹³ vg/mL, 2×10¹³ viral genomes (vg)/mL, 3×10¹³ viral genomes (vg)/mL, 4×10¹³ viral genomes (vg)/mL, 5×10¹³ viral genomes (vg)/mL, 6×10¹³ viral genomes (vg)/mL, 7×10¹³ viral genomes (vg)/mL, 8×10¹³ viral genomes (vg)/mL, or 9×10¹³ viral genomes (vg)/mL. Any suitable volume of the composition may be delivered to the subretinal space. In some instances, the volume is selected to form a bleb in the subretinal space, for example 1 microliter, 10 microliters, 50 microliters, 100 microliters, 150 microliters, 200 microliters, 250 microliters, 300 microliters, etc. Any region of the retina may be targeted, though the fovea (which extends approximately 1 degree out from the center of the eye) may be preferred in certain instances due to its role in central visual acuity and the relatively high concentration of cone photoreceptors there relative to peripheral regions of the retina. Alternatively or additionally, injections may be targeted to parafoveal regions (extending between approximately 2 and 10 degrees off center), which are characterized by the presence of all three types of retinal photoreceptor cells. In addition, injections into the parafoveal region may be made at comparatively acute angles using needle paths that cross the midline of the retina. For instance, injection paths may extend from the nasal aspect of the sclera near the limbus through the vitreal chamber and into the parafoveal retina on the temporal side, from the temporal aspect of the sclera to the parafoveal retina on the nasal side, from a portion of the sclera located superior to the cornea to an inferior parafoveal position, and/or from an inferior portion of the sclera to a superior parafoveal position. The use of relatively small angles of injection relative to the retinal surface may advantageously reduce or limit the potential for spillover of vector from the bleb into the vitreous body and, consequently, reduce the loss of the vector during delivery. In other cases, the macula (inclusive of the fovea) can be targeted, and in other cases, additional retinal regions can be targeted, or can receive spillover doses.

[1369] To mitigate ocular inflammation and associated discomfort, one or more corticosteroids may be administered before, during, and/or after administration of the composition comprising AAV vectors. In certain embodiments, the corticosteroid may be an oral corticosteroid. In certain embodiments, the oral corticosteroid may be prednisone. In certain embodiments, the corticosteroid may be administered as a prophylactic, prior to administration of the composition comprising AAV vectors. For example, the corticosteroid may be administered the day prior to administration, or 2 days, 3 days, 4 days, 5 days, 6 days, 7 days, 8 days, 9 days, 10 days, 11 days, 12 days, 13 days, or 14 days prior to administration of the composition comprising AAV vectors. In certain embodiments, the corticosteroid may be administered for 1 week to 10 weeks after administration of the composition comprising AAV vectors (e.g., 1 week, 2 weeks, 3 weeks, 4 weeks, 5 weeks, 6 weeks, 7 weeks, 8 weeks, 9 weeks, or 10 weeks after administration of the composition comprising AAV vectors). In certain embodiments, the corticosteroid treatment may be administered prior to (e.g., the day prior to administration, or 2 days, 3 days, 4 days, 5 days, 6 days, 7 days, 8 days, 9 days, 10 days, 11 days, 12 days, 13 days, or 14 days prior to administration) and after administration of the composition comprising AAV vectors (e.g., 1 week, 2 weeks, 3 weeks, 4 weeks, 5 weeks, 6 weeks, 7 weeks, 8 weeks, 9 weeks, or 10 weeks after administration). For example, the corticosteroid treatment may be administered beginning 3 days prior to until 6 weeks after administration of the AAV vector.

[1370] Suitable doses of corticosteroids may include, for example, 0.1 mg/kg/day to 10 mg/kd/day (e.g., 0.1 mg/kg/day, 0.2 mg/kg/day, 0.3 mg/kg/day, 0.4 mg/kg/day, 0.5 mg/kg/day, 0.6 mg/kg/day, 0.7 mg/kg/day, 0.8 mg/kg/day, 0.9 mg/kg/day, or 1.0 mg/kg/day). In certain embodiments, the corticosteroid may be administered at an elevated dose during the corticosteroid treatment, followed by a tapered dose of the corticosteroid. For example, 0.5 mg/kg/day corticosteroid may be administered for 4 weeks, followed by a 15-day taper (0.4 mg/kg/day for 5 days, and then 0.2 mg/kg/day for 5 days, and then 0.1 mg/kg/day for 5 days). The corticosteroid dose may be increased if there is an increase in vitreous inflammation by 1+ on the grading scale following surgery (e.g., within 4 weeks after surgery). For example, if there is an increase in vitreous inflammation by 1+ on the grading scale while the patient is receiving a 0.5 mg/kg/day dose (e.g., within 4 weeks after surgery), the corticosteroid dose may be may be increased to 1 mg/kg/day. If any inflammation is present within 4 weeks after surgery, the taper may be delayed.

[1371] For pre-clinical development purposes, systems, compositions, nucleotides and vectors according to this disclosure can be evaluated ex vivo using a retinal explant system, or in vivo using an animal model such as a mouse, rabbit, pig, nonhuman primate, etc. Retinal explants are optionally maintained on a support matrix, and AAV vectors can be delivered by injection into the space between the photoreceptor layer and the support matrix, to mimic subretinal injection. Tissue for retinal explantation can be obtained from human or animal subjects, for example mouse.

[1372] Explants are particularly useful for studying the expression of gRNAs and/or Cas9 following viral transduction, and for studying genome editing over comparatively short intervals. These models also permit higher throughput than may be possible in animal models, and can be predictive of expression and genome editing in animal models and subjects. Small (mouse, rat) and large animal models (such as rabbit, pig, nonhuman primate) can be used for pharmacological and/or toxicological studies and for testing the systems, nucleotides, vectors and compositions of this disclosure under conditions and at volumes that approximate those that will be used in clinic. Because model systems are selected to recapitulate relevant aspects of human anatomy and/or physiology, the data obtained in these systems will generally (though not necessarily) be predictive of the behavior of AAV vectors and compositions according to this disclosure in human and animal subjects.

[1373] While the foregoing exemplary embodiments have focused on guide RNAs, nucleic acids and AAV vectors targeted to the CEP290 gene, it will be appreciated by those of skill in the art that the nucleic acids and vectors of this disclosure may be used in the editing of other gene targets and the treatment of other diseases such as hereditary retinopathies that may be treated by editing of genes other than CEP290. In certain embodiments, it is contemplated that the same configuration of the nucleic acids or AAV vectors disclosed herein may be used to treat other inherited retinal diseases by modifying the gRNA targeting domains to target and alter the gene of interest.

[1374] FIGS. 25A-25D illustrate exemplary AAV vectors that may be used to transduce retinal cells, including without limitation retinal photoreceptor cells such as rod photoreceptors and/or cone photoreceptors, and/or other retinal cell types. The AAV genome of FIG. 25A comprises two guide RNAs comprising targeting domains according to one of the guide pairs of SEQ ID NOs: 389 and 388, SEQ ID NOs: 389 and 392, SEQ ID NOs: 389 and 394, SEQ ID NOs: 390 and 388, SEQ ID NOs: 390 and 392, SEQ ID NOS: 390 and 394, SEQ ID NOs: 391 and 388, SEQ ID NOs: 391 and 392, SEQ ID NOs: 391 and 394, and a promoter sequence according to one of CMV, EFS, hGRK1 driving expression of an S. aureus Cas9 comprising one or two nuclear localization signals and a polyadenylation signal. The vector may additionally include ITRs such as AAV2 ITRs, or other sequences that may be selected for the specific application to which the vector will be employed. A more detailed version of FIG. 25A is shown in FIG. 25D, illustrating that the AAV genome may also comprise a Simian virus 40 (SV40) splice donor/splice acceptor (SD/SA) sequence element. In certain embodiments, the SV40 SD/SA element may be positioned between the promoter and the Cas9 gene. In certain embodiments, a Kozak consensus sequence may precede the start codon of Cas9. The AAV genome of FIG. 25B comprises two guide RNAs according to SEQ ID NOs: 2785 or 2787, and a promoter sequence according to one of SEQ ID NOs: 401-403 driving expression of an S. aureus Cas9 comprising one or two nuclear localization signals and, optionally, a polyadenylation signal. The vector may additionally include ITRs such as AAV2 ITRs, or other sequences that may be selected for the specific application to which the vector will be employed. As is shown in FIG. 25C, other vectors within the scope of this disclosure may include only 1 guide RNA. Thus, in specific embodiments, an AAV genome of this disclosure may encode a CMV promoter for the Cas9 and one guide RNA having a sequence comprising, or sharing at least 90% sequence identity with, a sequence selected from SEQ ID NOs: 2785 and 2787; a CMV promoter for the Cas9 and two guide RNAs, each having a sequence comprising, or sharing at least 90% sequence identity with, a sequence selected from SEQ ID NOs: 2785 and 2787; an hGRK promoter for the Cas9 and one guide RNA having a sequence comprising, or sharing at least 90% sequence identity with, a sequence selected from SEQ ID NOs: 2785 and 2787; an hGRK promoter for the Cas9 and two guide RNAs, each having a sequence comprising, or sharing at least 90% sequence identity with, a sequence selected from SEQ ID NOs: 2785 and 2787; an EFS promoter for the Cas9 and one guide RNA having a sequence comprising, or sharing at least 90% sequence identity with, a sequence selected from SEQ ID NOs: 2785 and 2787; an EFS promoter for the Cas9 and two guide RNAs, each having a sequence comprising, or sharing at least 90% sequence identity with, a sequence selected from SEQ ID NOs: 2785 and 2787.

DNA-based Delivery of a Cas9 Molecule and/or a gRNA Molecule

[1375] Nucleic acids encoding Cas9 molecules (e.g., eaCas9 molecules) and/or gRNA molecules, can be administered to subjects or delivered into cells by art-known methods or as described herein. For example, Cas9-encoding and/or gRNA-encoding DNA can be delivered, e.g., by vectors (e.g., viral or non-viral vectors), non-vector based methods (e.g., using naked DNA or DNA complexes), or a combination thereof.

[1376] DNA encoding Cas9 molecules (e.g., eaCas9 molecules) and/or gRNA molecules can be conjugated to molecules (e.g., N-acetylgalactosamine) promoting uptake by the target cells (e.g., the target cells described herein). Donor template molecules can be conjugated to molecules (e.g., N-acetylgalactosamine) promoting uptake by the target cells (e.g., the target cells described herein).

[1377] In some embodiments, the Cas9- and/or gRNA-encoding DNA is delivered by a vector (e.g., viral vector/virus or plasmid).

[1378] A vector can comprise a sequence that encodes a Cas9 molecule and/or a gRNA molecule. A vector can also comprise a sequence encoding a signal peptide (e.g., for nuclear localization, nucleolar localization, mitochondrial localization), fused, e.g., to a Cas9 molecule sequence. For example, a vector can comprise a nuclear localization sequence (e.g., from SV40) fused to the sequence encoding the Cas9 molecule.

[1379] One or more regulatory/control elements, e.g., a promoter, an enhancer, an intron, a polyadenylation signal, a Kozak consensus sequence, internal ribosome entry sites (IRES), a 2A sequence, and splice acceptor or donor can be included in the vectors. In some embodiments, the promoter is recognized by RNA polymerase II (e.g., a CMV promoter). In other embodiments, the promoter is recognized by RNA polymerase III (e.g., a U6 promoter). In some embodiments, the promoter is a regulated promoter (e.g., inducible promoter). In other embodiments, the promoter is a constitutive promoter. In some embodiments, the promoter is a tissue specific promoter. In some embodiments, the promoter is a viral promoter. In other embodiments, the promoter is a non-viral promoter.

[1380] In some embodiments, the vector or delivery vehicle is a viral vector (e.g., for generation of recombinant viruses). In some embodiments, the virus is a DNA virus (e.g., dsDNA or ssDNA virus). In other embodiments, the virus is an RNA virus (e.g., an ssRNA virus). Exemplary viral vectors/viruses include, e.g., retroviruses, lentiviruses, adenovirus, adeno-associated virus (AAV), vaccinia viruses, poxviruses, and herpes simplex viruses.

[1381] In some embodiments, the virus infects dividing cells. In other embodiments, the virus infects non-dividing cells. In some embodiments, the virus infects both dividing and non-dividing cells. In some embodiments, the virus can integrate into the host genome. In some embodiments, the virus is engineered to have reduced immunity, e.g., in human. In some embodiments, the virus is replication-competent. In other embodiments, the virus is replication-defective, e.g., having one or more coding regions for the genes necessary for additional rounds of virion replication and/or packaging replaced with other genes or deleted. In some embodiments, the virus causes transient expression of the Cas9 molecule and/or the gRNA molecule. In other embodiments, the virus causes long-lasting, e.g., at least 1 week, 2 weeks, 1 month, 2 months, 3 months, 6 months, 9 months, 1 year, 2 years, or permanent expression, of the Cas9 molecule and/or the gRNA molecule. The packaging capacity of the viruses may vary, e.g., from at least about 4 kb to at least about 30 kb, e.g., at least about 5 kb, 10 kb, 15 kb, 20 kb, 25 kb, 30 kb, 35 kb, 40 kb, 45 kb, or 50 kb.

[1382] In an embodiment, the viral vector recognizes a specific cell type or tissue. For example, the viral vector can be pseudotyped with a different/alternative viral envelope glycoprotein; engineered with a cell type-specific receptor (e.g., genetic modification(s) of one or more viral envelope glycoproteins to incorporate a targeting ligand such as a peptide ligand, a single chain antibody, or a growth factor); and/or engineered to have a molecular bridge with dual specificities with one end recognizing a viral glycoprotein and the other end recognizing a moiety of the target cell surface (e.g., a ligand-receptor, monoclonal antibody, avidin-biotin and chemical conjugation).

[1383] In some embodiments, the Cas9- and/or gRNA-encoding DNA is delivered by a recombinant retrovirus. In some embodiments, the retrovirus (e.g., Moloney murine leukemia virus) comprises a reverse transcriptase, e.g., that allows integration into the host genome. In some embodiments, the retrovirus is replication-competent. In other embodiments, the retrovirus is replication-defective, e.g., having one of more coding regions for the genes necessary for additional rounds of virion replication and packaging replaced with other genes, or deleted.

[1384] In some embodiments, the Cas9- and/or gRNA-encoding DNA is delivered by a recombinant lentivirus. For example, the lentivirus is replication-defective, e.g., does not comprise one or more genes required for viral replication.

[1385] In some embodiments, the Cas9- and/or gRNA-encoding DNA is delivered by a recombinant adenovirus. In some embodiments, the adenovirus is engineered to have reduced immunity in human.

[1386] In some embodiments, the Cas9- and/or gRNA-encoding DNA is delivered by a recombinant AAV. In some embodiments, the AAV does not incorporate its genome into that of a host cell, e.g., a target cell as describe herein. In some embodiments, the AAV can incorporate at least part of its genome into that of a host cell, e.g., a target cell as described herein. In some embodiments, the AAV is a self-complementary adeno-associated virus (scAAV), e.g., a scAAV that packages both strands which anneal together to form double stranded DNA. AAV serotypes that may be used in the disclosed methods, include AAV1, AAV2, modified AAV2 (e.g., modifications at Y444F, Y500F, Y730F and/or S662V), AAV3, modified AAV3 (e.g., modifications at Y705F, Y731F and/or T492V), AAV4, AAV5, AAV6, modified AAV6 (e.g., modifications at S663V and/or T492V), AAV8, AAV 8.2, AAV9, AAV rhl0, and pseudotyped AAV, such as AAV2/8, AAV2/5 and AAV2/6 can also be used in the disclosed methods. In an embodiment, an AAV capsid that can be used in the methods described herein is a capsid sequence from serotype AAV1, AAV2, AAV3, AAV4, AAV5, AAV6, AAV7, AAV8, AAV9, AAV.rh8, AAV.rh10, AAV.rh32/33, AAV.rh43, AAV.rh64R1, or AAV7m8. Exemplary AAV serotypes and ITR sequences are disclosed in Table 25.

[1387] In an embodiment, the Cas9- and/or gRNA-encoding DNA is delivered in a re-engineered AAV capsid, e.g., with 50% or greater, e.g., 60% or greater, 70% or greater, 80% or greater, 90% or greater, or 95% or greater, sequence homology with a capsid sequence from serotypes AAV1, AAV2, AAV3, AAV4, AAV5, AAV6, AAV7, AAV8, AAV9, AAV.rh8, AAV.rh10, AAV.rh32/33, AAV.rh43, or AAV.rh64R1.

[1388] In an embodiment, the Cas9- and/or gRNA-encoding DNA is delivered by a chimeric AAV capsid. Exemplary chimeric AAV capsids include, but are not limited to, AAV9i1, AAV2i8, AAV-DJ, AAV2G9, AAV2i8G9, or AAV8G9.

[1389] In an embodiment, the AAV is a self-complementary adeno-associated virus (scAAV), e.g., a scAAV that packages both strands which anneal together to form double stranded DNA.

[1390] In some embodiments, the Cas9- and/or gRNA-encoding DNA is delivered by a hybrid virus, e.g., a hybrid of one or more of the viruses described herein. In an embodiment, the hybrid virus is hybrid of an AAV (e.g., of any AAV serotype), with a Bocavirus, B19 virus, porcine AAV, goose AAV, feline AAV, canine AAV, or MVM.

[1391] A packaging cell is used to form a virus particle that is capable of infecting a target cell. Such a cell includes a 293 cell, which can package adenovirus, and a ψ2 cell or a PA317 cell, which can package retrovirus. A viral vector used in gene therapy is usually generated by a producer cell line that packages a nucleic acid vector into a viral particle. The vector typically contains the minimal viral sequences required for packaging and subsequent integration into a host or target cell (if applicable), with other viral sequences being replaced by an expression cassette encoding the protein to be expressed, e.g., Cas9. For example, an AAV vector used in gene therapy typically only possesses inverted terminal repeat (ITR) sequences from the AAV genome which are required for packaging and gene expression in the host or target cell. The missing viral functions can be supplied in trans by the packaging cell line and/or plasmid containing E2A, E4, and VA genes from adenovirus, and plasmid encoding Rep and Cap genes from AAV, as described in “Triple Transfection Protocol.” Henceforth, the viral DNA is packaged in a cell line, which contains a helper plasmid encoding the other AAV genes, namely rep and cap, but lacking ITR sequences. In embodiment, the viral DNA is packaged in a producer cell line, which contains E1A and/or E1B genes from adenovirus. The cell line is also infected with adenovirus as a helper. The helper virus (e.g., adenovirus or HSV) or helper plasmid promotes replication of the AAV vector and expression of AAV genes from the plasmid with ITRs. The helper plasmid is not packaged in significant amounts due to a lack of ITR sequences. Contamination with adenovirus can be reduced by, e.g., heat treatment to which adenovirus is more sensitive than AAV.

[1392] In an embodiment, the viral vector has the ability of cell type and/or tissue type recognition. For example, the viral vector can be pseudotyped with a different/alternative viral envelope glycoprotein; engineered with a cell type-specific receptor (e.g., genetic modification of the viral envelope glycoproteins to incorporate targeting ligands such as a peptide ligand, a single chain antibody, a growth factor); and/or engineered to have a molecular bridge with dual specificities with one end recognizing a viral glycoprotein and the other end recognizing a moiety of the target cell surface (e.g., ligand-receptor, monoclonal antibody, avidin-biotin and chemical conjugation).

[1393] In an embodiment, the viral vector achieves cell type specific expression. For example, a tissue-specific promoter can be constructed to restrict expression of the transgene (Cas 9 and gRNA) in only the target cell. The specificity of the vector can also be mediated by microRNA-dependent control of transgene expression. In an embodiment, the viral vector has increased efficiency of fusion of the viral vector and a target cell membrane. For example, a fusion protein such as fusion-competent hemagglutin (HA) can be incorporated to increase viral uptake into cells. In an embodiment, the viral vector has the ability of nuclear localization. For example, a virus that requires the breakdown of the cell wall (during cell division) and therefore will not infect a non-diving cell can be altered to incorporate a nuclear localization peptide in the matrix protein of the virus thereby enabling the transduction of non-proliferating cells.

[1394] In some embodiments, the Cas9- and/or gRNA-encoding DNA is delivered by a non-vector based method (e.g., using naked DNA or DNA complexes). For example, the DNA can be delivered, e.g., by organically modified silica or silicate (Ormosil), electroporation, gene gun, sonoporation, magnetofection, lipid-mediated transfection, dendrimers, inorganic nanoparticles, calcium phosphates, or a combination thereof.

[1395] In some embodiments, the Cas9- and/or gRNA-encoding DNA is delivered by a combination of a vector and a non-vector based method. For example, a virosome comprises a liposome combined with an inactivated virus (e.g., HIV or influenza virus), which can result in more efficient gene transfer, e.g., in a respiratory epithelial cell than either a viral or a liposomal method alone.

[1396] In an embodiment, the delivery vehicle is a non-viral vector. In an embodiment, the non-viral vector is an inorganic nanoparticle. Exemplary inorganic nanoparticles include, e.g., magnetic nanoparticles (e.g., Fe₃MnO₂) and silica. The outer surface of the nanoparticle can be conjugated with a positively charged polymer (e.g., polyethylenimine, polylysine, polyserine) which allows for attachment (e.g., conjugation or entrapment) of payload. In an embodiment, the non-viral vector is an organic nanoparticle (e.g., entrapment of the payload inside the nanoparticle). Exemplary organic nanoparticles include, e.g., SNALP liposomes that contain cationic lipids together with neutral helper lipids which are coated with polyethylene glycol (PEG) and protamine and nucleic acid complex coated with lipid coating.

[1397] Exemplary lipids for gene transfer are shown below in Table 21.

TABLE 21
Lipids Used for Gene Transfer

| Lipid | Abbreviation | Feature |
|---|---|---|
| 1,2-Dioleoyl-sn-glycero- | DOPC | Helper |
| 3-phosphatidylcholine | | |
| 1,2-Dioleoyl-sn-glycero- | DOPE | Helper |
| 3-phosphatidylethanolamine | | |
| Cholesterol | | Helper |
| N-[1-(2,3- | DOTMA | Cationic |
| Dioleyloxy)prophyl]N,N,N- | | |
| trimethylammonium | | |
| chloride | | |
| 1,2-Dioleoyloxy-3- | DOTAP | Cationic |
| trimethylammonium-propane | | |
| Dioctadecylamidoglycylspermine | DOGS | Cationic |
| N-(3-Aminopropyl)-N,N- | GAP-DLRIE | Cationic |
| dimethyl-2,3-bis(dodecyloxy)-1- | | |
| propanaminium bromide | | |
| Cetyltrimethylammonium bromide | CTAB | Cationic |
| 6-Lauroxyhexyl ornithinate | LHON | Cationic |
| 1-(2,3-Dioleoyloxypropyl)- | 2Oc | Cationic |
| 2,4,6-trimethylpyridinium | | |
| 2,3-Dioleyloxy-N- | DOSPA | Cationic |
| [2(sperminecarboxamido- | | |
| ethyl]-N,N-dimethyl- | | |
| 1-propanaminium trifluoroacetate | | |
| 1,2-Dioleyl-3-trimethylammonium- | DOPA | Cationic |
| propane | | |
| N-(2-Hydroxyethyl)-N,N- | MDRIE | Cationic |
| dimethyl-2,3-bis(tetradecyloxy)-1- | | |
| propanaminium bromide | | |
| Dimyristooxypropyl dimethyl | DMRI | Cationic |
| hydroxyethyl ammonium bromide | | |
| 3β-[N-(N′,N′-Dimethylaminoethane)- | DC-Chol | Cationic |
| carbamoyl]cholesterol | | |
| Bis-guanidium-tren-cholesterol | BGTC | Cationic |
| 1,3-Diodeoxy-2-(6-carboxy- | DOSPER | Cationic |
| spermyl)-propylamide | | |
| Dimethyloctadecylammonium bromide | DDAB | Cationic |
| Dioctadecylamidoglicylspermidin | DSL | Cationic |
| rac-[(2,3-Dioctadecyloxypropyl)(2- | CLIP-1 | Cationic |
| hydroxyethyl)]- | | |
| dimethylammonium chloride | | |
| rac-[2(2,3-Dihexadecyloxypropyl- | CLIP-6 | Cationic |
| oxymethyloxy)ethyl]trimethyl- | | |
| ammonium bromide | | |
| Ethyldimyristoylphosphatidylcholine | EDMPC | Cationic |
| 1,2-Distearyloxy-N,N- | DSDMA | Cationic |
| dimethyl-3-aminopropane | | |
| 1,2-Dimyristoyl-trimethylammonium | DMTAP | Cationic |
| propane | | |
| O,O′-Dimyristyl-N-lysyl aspartate | DMKE | Cationic |
| 1,2-Distearoyl-sn-glycero-3- | DSEPC | Cationic |
| ethylphosphocholine | | |
| N-Palmitoyl D-erythro-sphingosyl | CCS | Cationic |
| carbamoyl-spermine | | |
| N-t-Butyl-N0-tetradecyl-3- | diC14-amidine | Cationic |
| tetradecylaminopropionamidine | | |
| Octadecenolyoxy[ethyl-2- | DOTIM | Cationic |
| heptadecenyl-3 hydroxyethyl] | | |
| imidazolinium chloride | | |
| N1-Cholesteryloxycarbonyl- | CDAN | Cationic |
| 3,7-diazanonane-1,9-diamine | | |
| 2-(3-[Bis(3-amino-propyl)- | RPR209120 | Cationic |
| amino]propylamino)-N- | | |
| ditetradecylcarbamoylme-ethyl-acetamide | | |
| 1,2-dilinoleyloxy-3-dimethylaminopropane | DLinDMA | Cationic |
| 2,2-dilinoleyl-4- | DLin-KC2- | Cationic |
| dimethylaminoethyl-[1,3]-dioxolane | DMA | |
| dilinoleyl-methyl-4-dimethylaminobutyrate | DLin-MC3- | Cationic |
| | DMA | |

[1398] Exemplary polymers for gene transfer are shown below in Table 22.

TABLE 22
Polymers Used for Gene Transfer

| Polymer | Abbreviation |
|---|---|
| Poly(ethylene)glycol | PEG |
| Polyethylenimine | PEI |
| Dithiobis(succinimidylpropionate) | DSP |
| Dimethyl-3,3′-dithiobispropionimidate | DTBP |
| Poly(ethylene imine)biscarbamate | PEIC |
| Poly(L-lysine) | PLL |
| Histidine modified PLL | |
| Poly(N-vinylpyrrolidone) | PVP |
| Poly(propylenimine) | PPI |
| Poly(amidoamine) | PAMAM |
| Poly(amidoethylenimine) | SS-PAEI |
| Triethylenetetramine | TETA |
| Poly(β-aminoester) | |
| Poly(4-hydroxy-L-proline ester) | PHP |
| Poly(allylamine) | |
| Poly(α-[4-aminobutyl]-L-glycolic acid) | PAGA |
| Poly(D,L-lactic-co-glycolic acid) | PLGA |
| Poly(N-ethyl-4-vinylpyridinium bromide) | |
| Poly(phosphazene)s | PPZ |
| Poly(phosphoester)s | PPE |
| Poly(phosphoramidate)s | PPA |
| Poly(N-2-hydroxypropylmethacrylamide) | pHPMA |
| Poly (2-(dimethylamino)ethyl methacrylate) | pDMAEMA |
| Poly(2-aminoethyl propylene phosphate) | PPE-EA |
| Chitosan | |
| Galactosylated chitosan | |
| N-Dodacylated chitosan | |
| Histone | |
| Collagen | |
| Dextran-spermine | D-SPM |

[1399] In an embodiment, the vehicle has targeting modifications to increase target cell update of nanoparticles and liposomes, e.g., cell specific antigens, monoclonal antibodies, single chain antibodies, aptamers, polymers, sugars, and cell penetrating peptides. In an embodiment, the vehicle uses fusogenic and endosome-destabilizing peptides/polymers. In an embodiment, the vehicle undergoes acid-triggered conformational changes (e.g., to accelerate endosomal escape of the cargo). In an embodiment, a stimuli-cleavable polymer is used, e.g., for release in a cellular compartment. For example, disulfide-based cationic polymers that are cleaved in the reducing cellular environment can be used.

[1400] In an embodiment, the delivery vehicle is a biological non-viral delivery vehicle. In an embodiment, the vehicle is an attenuated bacterium (e.g., naturally or artificially engineered to be invasive but attenuated to prevent pathogenesis and expressing the transgene (e.g., Listeria monocytogenes, certain Salmonella strains, Bifidobacterium longum, and modified Escherichia coli), bacteria having nutritional and tissue-specific tropism to target specific tissues, bacteria having modified surface proteins to alter target tissue specificity). In an embodiment, the vehicle is a genetically modified bacteriophage (e.g., engineered phages having large packaging capacity, less immunogenic, containing mammalian plasmid maintenance sequences and having incorporated targeting ligands). In an embodiment, the vehicle is a mammalian virus-like particle. For example, modified viral particles can be generated (e.g., by purification of the “empty” particles followed by ex vivo assembly of the virus with the desired cargo). The vehicle can also be engineered to incorporate targeting ligands to alter target tissue specificity. In an embodiment, the vehicle is a biological liposome. For example, the biological liposome is a phospholipid-based particle derived from human cells (e.g., erythrocyte ghosts, which are red blood cells broken down into spherical structures derived from the subject (e.g., tissue targeting can be achieved by attachment of various tissue or cell-specific ligands), or secretory exosomes-subject (i.e., patient) derived membrane-bound nanovesicle (30-100 nm) of endocytic origin (e.g., can be produced from various cell types and can therefore be taken up by cells without the need of for targeting ligands).

[1401] In an embodiment, one or more nucleic acid molecules (e.g., DNA molecules) other than the components of a Cas system, e.g., the Cas9 molecule component and/or the gRNA molecule component described herein, are delivered. In an embodiment, the nucleic acid molecule is delivered at the same time as one or more of the components of the Cas system are delivered. In an embodiment, the nucleic acid molecule is delivered before or after (e.g., less than about 30 minutes, 1 hour, 2 hours, 3 hours, 6 hours, 9 hours, 12 hours, 1 day, 2 days, 3 days, 1 week, 2 weeks, or 4 weeks) one or more of the components of the Cas system are delivered. In an embodiment, the nucleic acid molecule is delivered by a different means than one or more of the components of the Cas system, e.g., the Cas9 molecule component and/or the gRNA molecule component, are delivered. The nucleic acid molecule can be delivered by any of the delivery methods described herein. For example, the nucleic acid molecule can be delivered by a viral vector, e.g., an integration-deficient lentivirus, and the Cas9 molecule component and/or the gRNA molecule component can be delivered by electroporation, e.g., such that the toxicity caused by nucleic acids (e.g., DNAs) can be reduced. In an embodiment, the nucleic acid molecule encodes a therapeutic protein, e.g., a protein described herein. In an embodiment, the nucleic acid molecule encodes an RNA molecule, e.g., an RNA molecule described herein.

### Delivery of RNA Encoding a Cas9 Molecule

[1402] RNA encoding Cas9 molecules (e.g., eaCas9 molecules) and/or gRNA molecules, can be delivered into cells, e.g., target cells described herein, by art-known methods or as described herein. For example, Cas9-encoding and/or gRNA-encoding RNA can be delivered, e.g., by microinjection, electroporation, lipid-mediated transfection, peptide-mediated delivery, or a combination thereof. Cas9-encoding and/or gRNA-encoding RNA can be conjugated to molecules (e.g., GalNAc) promoting uptake by the target cells (e.g., target cells described herein).

### Delivery Cas9 Protein

[1403] Cas9 molecules (e.g., eaCas9 molecules) can be delivered into cells by art-known methods or as described herein. For example, Cas9 protein molecules can be delivered, e.g., by microinjection, electroporation, lipid-mediated transfection, peptide-mediated delivery, or a combination thereof. Delivery can be accompanied by DNA encoding a gRNA or by a gRNA. Cas9-encoding and/or gRNA-encoding RNA can be conjugated to molecules (e.g., GalNAc) promoting uptake by the target cells (e.g., target cells described herein).

### Route of Administration

[1404] Systemic modes of administration include oral and parenteral routes. Parenteral routes include, by way of example, intravenous, intrarterial, intramuscular, intradermal, subcutaneous, intranasal and intraperitoneal routes. Components administered systemically may be modified or formulated to target the components to the eye.

[1405] Local modes of administration include, by way of example, intraocular, intraorbital, subconjuctival, intravitreal, subretinal or transscleral routes. In an embodiment, significantly smaller amounts of the components (compared with systemic approaches) may exert an effect when administered locally (for example, intravitreally) compared to when administered systemically (for example, intravenously). Local modes of administration can reduce or eliminate the incidence of potentially toxic side effects that may occur when therapeutically effective amounts of a component are administered systemically.

[1406] In an embodiment, components described herein are delivered subretinally, e.g., by subretinal injection. Subretinal injections may be made directly into the macular, e.g., submacular injection.

[1407] In an embodiment, components described herein are delivered by intravitreal injection. Intravitreal injection has a relatively low risk of retinal detachment. In an embodiment, nanoparticle or viral, e.g., AAV vector, is delivered intravitreally.

[1408] Methods for administration of agents to the eye are known in the medical arts and can be used to administer components described herein. Exemplary methods include intraocular injection (e.g., retrobulbar, subretinal, submacular, intravitreal and intrachoridal), iontophoresis, eye drops, and intraocular implantation (e.g., intravitreal, sub-Tenons and sub-conjunctival).

[1409] Administration may be provided as a periodic bolus (for example, subretinally, intravenously or intravitreally) or as continuous infusion from an internal reservoir (for example, from an implant disposed at an intra- or extra-ocular location (see, U.S. Pat. Nos. 5,443,505 and 5,766,242)) or from an external reservoir (for example, from an intravenous bag). Components may be administered locally, for example, by continuous release from a sustained release drug delivery device immobilized to an inner wall of the eye or via targeted transscleral controlled release into the choroid (see, e.g., PCT/US00/00207; PCT/US02/14279; Ambati 2000a; Ambati 2000b. A variety of devices suitable for administering components locally to the inside of the eye are known in the art. See, for example, U.S. Pat. Nos. 6,251,090; 6,299,895; 6,416,777; and 6,413,540; and PCT Appl. No. PCT/US00/28187.

[1410] In addition, components may be formulated to permit release over a prolonged period of time. A release system can include a matrix of a biodegradable material or a material which releases the incorporated components by diffusion. The components can be homogeneously or heterogeneously distributed within the release system. A variety of release systems may be useful, however, the choice of the appropriate system will depend upon rate of release required by a particular application. Both non-degradable and degradable release systems can be used. Suitable release systems include polymers and polymeric matrices, non-polymeric matrices, or inorganic and organic excipients and diluents such as, but not limited to, calcium carbonate and sugar (for example, trehalose). Release systems may be natural or synthetic. However, synthetic release systems are preferred because generally they are more reliable, more reproducible and produce more defined release profiles. The release system material can be selected so that components having different molecular weights are released by diffusion through or degradation of the material.

[1411] Representative synthetic, biodegradable polymers include, for example: polyamides such as poly(amino acids) and poly(peptides); polyesters such as poly(lactic acid), poly(glycolic acid), poly(lactic-co-glycolic acid), and poly(caprolactone); poly(anhydrides); polyorthoesters; polycarbonates; and chemical derivatives thereof (substitutions, additions of chemical groups, for example, alkyl, alkylene, hydroxylations, oxidations, and other modifications routinely made by those skilled in the art), copolymers and mixtures thereof. Representative synthetic, non-degradable polymers include, for example: polyethers such as poly(ethylene oxide), poly(ethylene glycol), and poly(tetramethylene oxide); vinyl polymers-polyacrylates and polymethacrylates such as methyl, ethyl, other alkyl, hydroxyethyl methacrylate, acrylic and methacrylic acids, and others such as poly(vinyl alcohol), poly(vinyl pyrolidone), and poly(vinyl acetate); poly(urethanes); cellulose and its derivatives such as alkyl, hydroxyalkyl, ethers, esters, nitrocellulose, and various cellulose acetates; polysiloxanes; and any chemical derivatives thereof (substitutions, additions of chemical groups, for example, alkyl, alkylene, hydroxylations, oxidations, and other modifications routinely made by those skilled in the art), copolymers and mixtures thereof.

[1412] Poly(lactide-co-glycolide) microsphere can also be used for intraocular injection. Typically the microspheres are composed of a polymer of lactic acid and glycolic acid, which are structured to form hollow spheres. The spheres can be approximately 15-30 microns in diameter and can be loaded with components described herein.

### Bi-Modal or Differential Delivery of Components

[1413] Separate delivery of the components of a Cas system, e.g., the Cas9 molecule component and the gRNA molecule component, and more particularly, delivery of the components by differing modes, can enhance performance, e.g., by improving tissue specificity and safety.

[1414] In an embodiment, the Cas9 molecule and the gRNA molecule are delivered by different modes, or as sometimes referred to herein as differential modes. Different or differential modes, as used herein, refer modes of delivery that confer different pharmacodynamic or pharmacokinetic properties on the subject component molecule, e.g., a Cas9 molecule, gRNA molecule, template nucleic acid, or payload. For example, the modes of delivery can result in different tissue distribution, different half-life, or different temporal distribution, e.g., in a selected compartment, tissue, or organ.

[1415] Some modes of delivery, e.g., delivery by a nucleic acid vector that persists in a cell, or in progeny of a cell, e.g., by autonomous replication or insertion into cellular nucleic acid, result in more persistent expression of and presence of a component. Examples include viral, e.g., adeno associated virus or lentivirus, delivery.

[1416] By way of example, the components, e.g., a Cas9 molecule and a gRNA molecule, can be delivered by modes that differ in terms of resulting half-life or persistent of the delivered component the body, or in a particular compartment, tissue or organ. In an embodiment, a gRNA molecule can be delivered by such modes. The Cas9 molecule component can be delivered by a mode which results in less persistence or less exposure to the body or a particular compartment or tissue or organ.

[1417] More generally, in an embodiment, a first mode of delivery is used to deliver a first component and a second mode of delivery is used to deliver a second component. The first mode of delivery confers a first pharmacodynamic or pharmacokinetic property. The first pharmacodynamic property can be, e.g., distribution, persistence, or exposure, of the component, or of a nucleic acid that encodes the component, in the body, a compartment, tissue or organ. The second mode of delivery confers a second pharmacodynamic or pharmacokinetic property. The second pharmacodynamic property can be, e.g., distribution, persistence, or exposure, of the component, or of a nucleic acid that encodes the component, in the body, a compartment, tissue or organ.

[1418] In an embodiment, the first pharmacodynamic or pharmacokinetic property, e.g., distribution, persistence or exposure, is more limited than the second pharmacodynamic or pharmacokinetic property.

[1419] In an embodiment, the first mode of delivery is selected to optimize, e.g., minimize, a pharmacodynamic or pharmacokinetic property, e.g., distribution, persistence or exposure.

[1420] In an embodiment, the second mode of delivery is selected to optimize, e.g., maximize, a pharmacodynamic or pharmacokinetic property, e.g., distribution, persistence or exposure.

[1421] In an embodiment, the first mode of delivery comprises the use of a relatively persistent element, e.g., a nucleic acid, e.g., a plasmid or viral vector, e.g., an AAV or lentivirus. As such vectors are relatively persistent product transcribed from them would be relatively persistent.

[1422] In an embodiment, the second mode of delivery comprises a relatively transient element, e.g., an RNA or protein.

[1423] In an embodiment, the first component comprises gRNA, and the delivery mode is relatively persistent, e.g., the gRNA is transcribed from a plasmid or viral vector, e.g., an AAV or lentivirus. Transcription of these genes would be of little physiological consequence because the genes do not encode for a protein product, and the gRNAs are incapable of acting in isolation. The second component, a Cas9 molecule, is delivered in a transient manner, for example as mRNA or as protein, ensuring that the full Cas9 molecule/gRNA molecule complex is only present and active for a short period of time.

[1424] Furthermore, the components can be delivered in different molecular form or with different delivery vectors that complement one another to enhance safety and tissue specificity.

[1425] Use of differential delivery modes can enhance performance, safety and efficacy. E.g., the likelihood of an eventual off-target modification can be reduced. Delivery of immunogenic components, e.g., Cas9 molecules, by less persistent modes can reduce immunogenicity, as peptides from the bacterially-derived Cas enzyme are displayed on the surface of the cell by MHC molecules. A two-part delivery system can alleviate these drawbacks.

[1426] Differential delivery modes can be used to deliver components to different, but overlapping target regions. The formation active complex is minimized outside the overlap of the target regions. Thus, in an embodiment, a first component, e.g., a gRNA molecule is delivered by a first delivery mode that results in a first spatial, e.g., tissue, distribution. A second component, e.g., a Cas9 molecule is delivered by a second delivery mode that results in a second spatial, e.g., tissue, distribution. In an embodiment the first mode comprises a first element selected from a liposome, nanoparticle, e.g., polymeric nanoparticle, and a nucleic acid, e.g., viral vector. The second mode comprises a second element selected from the group. In an embodiment, the first mode of delivery comprises a first targeting element, e.g., a cell specific receptor or an antibody, and the second mode of delivery does not include that element. In embodiment, the second mode of delivery comprises a second targeting element, e.g., a second cell specific receptor or second antibody.

[1427] When the Cas9 molecule is delivered in a virus delivery vector, a liposome, or polymeric nanoparticle, there is the potential for delivery to and therapeutic activity in multiple tissues, when it may be desirable to only target a single tissue. A two-part delivery system can resolve this challenge and enhance tissue specificity. If the gRNA molecule and the Cas9 molecule are packaged in separated delivery vehicles with distinct but overlapping tissue tropism, the fully functional complex is only be formed in the tissue that is targeted by both vectors.

### Ex Vivo Delivery

[1428] In some embodiments, components described in Table 18 are introduced into cells which are then introduced into the subject. Methods of introducing the components can include, e.g., any of the delivery methods described in Table 19.

### VIII. Modified Nucleosides, Nucleotides, and Nucleic Acids

[1429] Modified nucleosides and modified nucleotides can be present in nucleic acids, e.g., particularly gRNA, but also other forms of RNA, e.g., mRNA, RNAi, or siRNA. As described herein, “nucleoside” is defined as a compound containing a five-carbon sugar molecule (a pentose or ribose) or derivative thereof, and an organic base, purine or pyrimidine, or a derivative thereof. As described herein, “nucleotide” is defined as a nucleoside further comprising a phosphate group.

[1430] Modified nucleosides and nucleotides can include one or more of:
[1431] (i) alteration, e.g., replacement, of one or both of the non-linking phosphate oxygens and/or of one or more of the linking phosphate oxygens in the phosphodiester backbone linkage;
[1432] (ii) alteration, e.g., replacement, of a constituent of the ribose sugar, e.g., of the 2′ hydroxyl on the ribose sugar;
[1433] (iii) wholesale replacement of the phosphate moiety with “dephospho” linkers;
[1434] (iv) modification or replacement of a naturally occurring nucleobase;
[1435] (v) replacement or modification of the ribose-phosphate backbone;
[1436] (vi) modification of the 3′ end or 5′ end of the oligonucleotide, e.g., removal, modification or replacement of a terminal phosphate group or conjugation of a moiety; and
[1437] (vii) modification of the sugar.

[1438] The modifications listed above can be combined to provide modified nucleosides and nucleotides that can have two, three, four, or more modifications. For example, a modified nucleoside or nucleotide can have a modified sugar and a modified nucleobase. In an embodiment, every base of a gRNA is modified, e.g., all bases have a modified phosphate group, e.g., all are phosphorothioate groups. In an embodiment, all, or substantially all, of the phosphate groups of a unimolecular or modular gRNA molecule are replaced with phosphorothioate groups.

[1439] In an embodiment, modified nucleotides, e.g., nucleotides having modifications as described herein, can be incorporated into a nucleic acid, e.g., a “modified nucleic acid.” In some embodiments, the modified nucleic acids comprise one, two, three or more modified nucleotides. In some embodiments, at least 5% (e.g., at least about 5%, at least about 10%, at least about 15%, at least about 20%, at least about 25%, at least about 30%, at least about 35%, at least about 40%, at least about 45%, at least about 50%, at least about 55%, at least about 60%, at least about 65%, at least about 70%, at least about 75%, at least about 80%, at least about 85%, at least about 90%, at least about 95%, or about 100%) of the positions in a modified nucleic acid are a modified nucleotides.

[1440] Unmodified nucleic acids can be prone to degradation by, e.g., cellular nucleases. For example, nucleases can hydrolyze nucleic acid phosphodiester bonds. Accordingly, in one aspect the modified nucleic acids described herein can contain one or more modified nucleosides or nucleotides, e.g., to introduce stability toward nucleases.

[1441] In some embodiments, the modified nucleosides, modified nucleotides, and modified nucleic acids described herein can exhibit a reduced innate immune response when introduced into a population of cells, both in vivo and ex vivo. The term “innate immune response” includes a cellular response to exogenous nucleic acids, including single stranded nucleic acids, generally of viral or bacterial origin, which involves the induction of cytokine expression and release, particularly the interferons, and cell death. In some embodiments, the modified nucleosides, modified nucleotides, and modified nucleic acids described herein can disrupt binding of a major groove interacting partner with the nucleic acid. In some embodiments, the modified nucleosides, modified nucleotides, and modified nucleic acids described herein can exhibit a reduced innate immune response when introduced into a population of cells, both in vivo and ex vivo, and also disrupt binding of a major groove interacting partner with the nucleic acid.

### Definitions of Chemical Groups

[1442] As used herein, “alkyl” is meant to refer to a saturated hydrocarbon group which is straight-chained or branched. Example alkyl groups include methyl (Me), ethyl (Et), propyl (e.g., n-propyl and isopropyl), butyl (e.g., n-butyl, isobutyl, t-butyl), pentyl (e.g., n-pentyl, isopentyl, neopentyl), and the like. An alkyl group can contain from 1 to about 20, from 2 to about 20, from 1 to about 12, from 1 to about 8, from 1 to about 6, from 1 to about 4, or from 1 to about 3 carbon atoms.

[1443] As used herein, “aryl” refers to monocyclic or polycyclic (e.g., having 2, 3 or 4 fused rings) aromatic hydrocarbons such as, for example, phenyl, naphthyl, anthracenyl, phenanthrenyl, indanyl, indenyl, and the like. In some embodiments, aryl groups have from 6 to about 20 carbon atoms.

[1444] As used herein, “alkenyl” refers to an aliphatic group containing at least one double bond.

[1445] As used herein, “alkynyl” refers to a straight or branched hydrocarbon chain containing 2-12 carbon atoms and characterized in having one or more triple bonds. Examples of alkynyl groups include, but are not limited to, ethynyl, propargyl, and 3-hexynyl.

[1446] As used herein, “arylalkyl” or “aralkyl” refers to an alkyl moiety in which an alkyl hydrogen atom is replaced by an aryl group. Aralkyl includes groups in which more than one hydrogen atom has been replaced by an aryl group. Examples of “arylalkyl” or “aralkyl” include benzyl, 2-phenylethyl, 3-phenylpropyl, 9-fluorenyl, benzhydryl, and trityl groups.

[1447] As used herein, “cycloalkyl” refers to a cyclic, bicyclic, tricyclic, or polycyclic non-aromatic hydrocarbon groups having 3 to 12 carbons. Examples of cycloalkyl moieties include, but are not limited to, cyclopropyl, cyclopentyl, and cyclohexyl.

[1448] As used herein, “heterocyclyl” refers to a monovalent radical of a heterocyclic ring system. Representative heterocyclyls include, without limitation, tetrahydrofuranyl, tetrahydrothienyl, pyrrolidinyl, pyrrolidonyl, piperidinyl, pyrrolinyl, piperazinyl, dioxanyl, dioxolanyl, diazepinyl, oxazepinyl, thiazepinyl, and morpholinyl.

[1449] As used herein, “heteroaryl” refers to a monovalent radical of a heteroaromatic ring system. Examples of heteroaryl moieties include, but are not limited to, imidazolyl, oxazolyl, thiazolyl, triazolyl, pyrrolyl, furanyl, indolyl, thiophenyl pyrazolyl, pyridinyl, pyrazinyl, pyridazinyl, pyrimidinyl, indolizinyl, purinyl, naphthyridinyl, quinolyl, and pteridinyl.

### Phosphate Backbone Modifications

### Phosphate Group

[1450] In some embodiments, the phosphate group of a modified nucleotide can be modified by replacing one or more of the oxygens with a different substituent. Further, the modified nucleotide, e.g., modified nucleotide present in a modified nucleic acid, can include the wholesale replacement of an unmodified phosphate moiety with a modified phosphate as described herein. In some embodiments, the modification of the phosphate backbone can include alterations that result in either an uncharged linker or a charged linker with unsymmetrical charge distribution.

[1451] Examples of modified phosphate groups include, phosphorothioate, phosphoroselenates, borano phosphates, borano phosphate esters, hydrogen phosphonates, phosphoroamidates, alkyl or aryl phosphonates and phosphotriesters. In some embodiments, one of the non-bridging phosphate oxygen atoms in the phosphate backbone moiety can be replaced by any of the following groups: sulfur(S), selenium (Se), BR₃ (wherein R can be, e.g., hydrogen, alkyl, or aryl), C (e.g., an alkyl group, an aryl group, and the like), H, NR₂ (wherein R can be, e.g., hydrogen, alkyl, or aryl), or OR (wherein R can be, e.g., alkyl or aryl). The phosphorous atom in an unmodified phosphate group is achiral. However, replacement of one of the non-bridging oxygens with one of the above atoms or groups of atoms can render the phosphorous atom chiral; that is to say that a phosphorous atom in a phosphate group modified in this way is a stereogenic center. The stereogenic phosphorous atom can possess either the “R” configuration (herein Rp) or the “S” configuration (herein Sp).

[1452] Phosphorodithioates have both non-bridging oxygens replaced by sulfur. The phosphorus center in the phosphorodithioates is achiral which precludes the formation of oligoribonucleotide diastereomers. In some embodiments, modifications to one or both non-bridging oxygens can also include the replacement of the non-bridging oxygens with a group independently selected from S, Se, B, C, H, N, and OR (R can be, e.g., alkyl or aryl).

[1453] The phosphate linker can also be modified by replacement of a bridging oxygen, (i.e., the oxygen that links the phosphate to the nucleoside), with nitrogen (bridged phosphoroamidates), sulfur (bridged phosphorothioates) and carbon (bridged methylenephosphonates). The replacement can occur at either linking oxygen or at both of the linking oxygens.

### Replacement of the Phosphate Group

[1454] The phosphate group can be replaced by non-phosphorus containing connectors. In some embodiments, the charge phosphate group can be replaced by a neutral moiety.

[1455] Examples of moieties which can replace the phosphate group can include, without limitation, e.g., methyl phosphonate, hydroxylamino, siloxane, carbonate, carboxymethyl, carbamate, amide, thioether, ethylene oxide linker, sulfonate, sulfonamide, thioformacetal, formacetal, oxime, methyleneimino, methylenemethylimino, methylenehydrazo, methylenedimethylhydrazo and methyleneoxymethylimino.

### Replacement of the Ribophosphate Backbone

[1456] Scaffolds that can mimic nucleic acids can also be constructed wherein the phosphate linker and ribose sugar are replaced by nuclease resistant nucleoside or nucleotide surrogates. In some embodiments, the nucleobases can be tethered by a surrogate backbone. Examples can include, without limitation, the morpholino, cyclobutyl, pyrrolidine and peptide nucleic acid (PNA) nucleoside surrogates.

### Sugar Modifications

[1457] The modified nucleosides and modified nucleotides can include one or more modifications to the sugar group. For example, the 2′ hydroxyl group (OH) can be modified or replaced with a number of different “oxy” or “deoxy” substituents. In some embodiments, modifications to the 2′ hydroxyl group can enhance the stability of the nucleic acid since the hydroxyl can no longer be deprotonated to form a 2′-alkoxide ion. The 2′-alkoxide can catalyze degradation by intramolecular nucleophilic attack on the linker phosphorus atom.

[1458] Examples of “oxy”-2′ hydroxyl group modifications can include alkoxy or aryloxy (OR, wherein “R” can be, e.g., alkyl, cycloalkyl, aryl, aralkyl, heteroaryl or a sugar); polyethyleneglycols (PEG), O(CH₂CH₂O)ₙCH₂CH₂OR wherein R can be, e.g., H or optionally substituted alkyl, and n can be an integer from 0 to 20 (e.g., from 0 to 4, from 0 to 8, from 0 to 10, from 0 to 16, from 1 to 4, from 1 to 8, from 1 to 10, from 1 to 16, from 1 to 20, from 2 to 4, from 2 to 8, from 2 to 10, from 2 to 16, from 2 to 20, from 4 to 8, from 4 to 10, from 4 to 16, and from 4 to 20). In some embodiments, the “oxy”-2′ hydroxyl group modification can include “locked” nucleic acids (LNA) in which the 2′ hydroxyl can be connected, e.g., by a C₁₋₆ alkylene or C₁₋₆ heteroalkylene bridge, to the 4′ carbon of the same ribose sugar, where exemplary bridges can include methylene, propylene, ether, or amino bridges; O-amino (wherein amino can be, e.g., NH₂; alkylamino, dialkylamino, heterocyclyl, arylamino, diarylamino, heteroarylamino, or diheteroarylamino, ethylenediamine, or polyamino) and aminoalkoxy, O(CH₂)ₙ-amino, (wherein amino can be, e.g., NH₂; alkylamino, dialkylamino, heterocyclyl, arylamino, diarylamino, heteroarylamino, or diheteroarylamino, ethylenediamine, or polyamino). In some embodiments, the “oxy”-2′ hydroxyl group modification can include the methoxyethyl group (MOE), (OCH₂CH₂OCH₃, e.g., a PEG derivative).

[1459] “Deoxy” modifications can include hydrogen (i.e. deoxyribose sugars, e.g., at the overhang portions of partially ds RNA); halo (e.g., bromo, chloro, fluoro, or iodo); amino (wherein amino can be, e.g., NH₂; alkylamino, dialkylamino, heterocyclyl, arylamino, diarylamino, heteroarylamino, diheteroarylamino, or amino acid); NH(CH₂CH₂NH)ₙCH₂CH₂-amino (wherein amino can be, e.g., as described herein), —NHC(O)R (wherein R can be, e.g., alkyl, cycloalkyl, aryl, aralkyl, heteroaryl or sugar), cyano; mercapto; alkyl-thio-alkyl; thioalkoxy; and alkyl, cycloalkyl, aryl, alkenyl and alkynyl, which may be optionally substituted with e.g., an amino as described herein.

[1460] The sugar group can also contain one or more carbons that possess the opposite stereochemical configuration than that of the corresponding carbon in ribose. Thus, a modified nucleic acid can include nucleotides containing e.g., arabinose, as the sugar. The nucleotide “monomer” can have an alpha linkage at the 1′ position on the sugar, e.g., alpha-nucleosides. The modified nucleic acids can also include “abasic” sugars, which lack a nucleobase at C-1′. These abasic sugars can also be further modified at one or more of the constituent sugar atoms. The modified nucleic acids can also include one or more sugars that are in the L form, e.g. L-nucleosides.

[1461] Generally, RNA includes the sugar group ribose, which is a 5-membered ring having an oxygen. Exemplary modified nucleosides and modified nucleotides can include, without limitation, replacement of the oxygen in ribose (e.g., with sulfur(S), selenium (Se), or alkylene, such as, e.g., methylene or ethylene); addition of a double bond (e.g., to replace ribose with cyclopentenyl or cyclohexenyl); ring contraction of ribose (e.g., to form a 4-membered ring of cyclobutane or oxetane); ring expansion of ribose (e.g., to form a 6- or 7-membered ring having an additional carbon or heteroatom, such as for example, anhydrohexitol, altritol, mannitol, cyclohexanyl, cyclohexenyl, and morpholino that also has a phosphoramidate backbone). In some embodiments, the modified nucleotides can include multicyclic forms (e.g., tricyclo; and “unlocked” forms, such as glycol nucleic acid (GNA) (e.g., R-GNA or S-GNA, where ribose is replaced by glycol units attached to phosphodiester bonds), threose nucleic acid (TNA, where ribose is replaced with α-L-threofuranosyl-(3′-+2′)).

### Modifications on the Nucleobase

[1462] The modified nucleosides and modified nucleotides described herein, which can be incorporated into a modified nucleic acid, can include a modified nucleobase. Examples of nucleobases include, but are not limited to, adenine (A), guanine (G), cytosine (C), and uracil (U). These nucleobases can be modified or wholly replaced to provide modified nucleosides and modified nucleotides that can be incorporated into modified nucleic acids. The nucleobase of the nucleotide can be independently selected from a purine, a pyrimidine, a purine or pyrimidine analog. In some embodiments, the nucleobase can include, for example, naturally-occurring and synthetic derivatives of a base.

### Uracil

[1463] In some embodiments, the modified nucleobase is a modified uracil. Exemplary nucleobases and nucleosides having a modified uracil include without limitation pseudouridine (ψ), pyridin-4-one ribonucleoside, 5-aza-uridine, 6-aza-uridine, 2-thio-5-aza-uridine, 2-thio-uridine (s2U), 4-thio-uridine (s4U), 4-thio-pseudouridine, 2-thio-pseudouridine, 5-hydroxy-uridine (ho⁵U), 5-aminoallyl-uridine, 5-halo-uridine (e.g., 5-iodo-uridine or 5-bromo-uridine), 3-methyl-uridine (m³U), 5-methoxy-uridine (mo⁵U), uridine 5-oxyacetic acid (cmo⁵U), uridine 5-oxyacetic acid methyl ester (mcmo⁵U), 5-carboxymethyl-uridine (cm⁵U), 1-carboxymethyl-pseudouridine, 5-carboxyhydroxymethyl-uridine (chm⁵U), 5-carboxyhydroxymethyl-uridine methyl ester (mchm⁵U), 5-methoxycarbonylmethyl-uridine (mcm⁵U), 5-methoxycarbonylmethyl-2-thio-uridine (mcm⁵s2U), 5-aminomethyl-2-thio-uridine (nm⁵s2U), 5-methylaminomethyl-uridine (mnm⁵U), 5-methylaminomethyl-2-thio-uridine (mnm⁵s2U), 5-methylaminomethyl-2-seleno-uridine (mnm⁵se²U), 5-carbamoylmethyl-uridine (ncm⁵U), 5-carboxymethylaminomethyl-uridine (cmnm⁵U), 5-carboxymethylaminomethyl-2-thio-uridine (cmnm⁵s2U), 5-propynyl-uridine, 1-propynyl-pseudouridine, 5-taurinomethyl-uridine (τcm⁵U), 1-taurinomethyl-pseudouridine, 5-taurinomethyl-2-thio-uridine (τm⁵s2U), 1-taurinomethyl-4-thio-pseudouridine, 5-methyl-uridine (m⁵U, i.e., having the nucleobase deoxythymine), 1-methyl-pseudouridine (m¹ψ), 5-methyl-2-thio-uridine (m⁵s2U), 1-methyl-4-thio-pseudouridine (m¹s⁴ψ), 4-thio-1-methyl-pseudouridine, 3-methyl-pseudouridine (m³ψ), 2-thio-1-methyl-pseudouridine, 1-methyl-1-deaza-pseudouridine, 2-thio-1-methyl-1-deaza-pseudouridine, dihydrouridine (D), dihydropseudouridine, 5,6-dihydrouridine, 5-methyl-dihydrouridine (m⁵D), 2-thio-dihydrouridine, 2-thio-dihydropseudouridine, 2-methoxy-uridine, 2-methoxy-4-thio-uridine, 4-methoxy-pseudouridine, 4-methoxy-2-thio-pseudouridine, N1-methyl-pseudouridine, 3-(3-amino-3-carboxypropyl) uridine (acp³U), 1-methyl-3-(3-amino-3-carboxypropyl) pseudouridine (acp³ψ), 5-(isopentenylaminomethyl) uridine (inm⁵U), 5-(isopentenylaminomethyl)-2-thio-uridine (inm⁵s2U), α-thio-uridine, 2′-O-methyl-uridine (Um), 5,2′-O-dimethyl-uridine (m⁵Um), 2′-O-methyl-pseudouridine (ψm), 2-thio-2′-O-methyl-uridine (s2Um), 5-methoxycarbonylmethyl-2′-O-methyl-uridine (mcm⁵Um), 5-carbamoylmethyl-2′-O-methyl-uridine (ncm⁵Um), 5-carboxymethylaminomethyl-2′-O-methyl-uridine (cmnm⁵Um), 3,2′-O-dimethyl-uridine (m³Um), 5-(isopentenylaminomethyl)-2′-O-methyl-uridine (inm⁵Um), 1-thio-uridine, deoxythymidine, 2′-F-ara-uridine, 2′-F-uridine, 2′-OH-ara-uridine, 5-(2-carbomethoxyvinyl) uridine, 5-[3-(1-E-propenylamino) uridine, pyrazolo[3,4-d]pyrimidines, xanthine, and hypoxanthine.

### Cytosine

[1464] In some embodiments, the modified nucleobase is a modified cytosine. Exemplary nucleobases and nucleosides having a modified cytosine include without limitation 5-aza-cytidine, 6-aza-cytidine, pseudoisocytidine, 3-methyl-cytidine (m3C), N4-acetyl-cytidine (act), 5-formyl-cytidine (f⁵C), N4-methyl-cytidine (m4C), 5-methyl-cytidine (m⁵C), 5-halo-cytidine (e.g., 5-iodo-cytidine), 5-hydroxymethyl-cytidine (hm⁵C), 1-methyl-pseudoisocytidine, pyrrolo-cytidine, pyrrolo-pseudoisocytidine, 2-thio-cytidine (s2C), 2-thio-5-methyl-cytidine, 4-thio-pseudoisocytidine, 4-thio-1-methyl-pseudoisocytidine, 4-thio-1-methyl-1-deaza-pseudoisocytidine, 1-methyl-1-deaza-pseudoisocytidine, zebularine, 5-aza-zebularine, 5-methyl-zebularine, 5-aza-2-thio-zebularine, 2-thio-zebularine, 2-methoxy-cytidine, 2-methoxy-5-methyl-cytidine, 4-methoxy-pseudoisocytidine, 4-methoxy-1-methyl-pseudoisocytidine, lysidine (k²C), α-thio-cytidine, 2′-O-methyl-cytidine (Cm), 5,2′-O-dimethyl-cytidine (m⁵Cm), N4-acetyl-2′-O-methyl-cytidine (ac⁴Cm), N4,2′-O-dimethyl-cytidine (m⁴Cm), 5-formyl-2′-O-methyl-cytidine (f⁵ Cm), N4,N4,2′-O-trimethyl-cytidine (m⁴₂Cm), 1-thio-cytidine, 2′-F-ara-cytidine, 2′-F-cytidine, and 2′-OH-ara-cytidine.

### Adenine

[1465] In some embodiments, the modified nucleobase is a modified adenine. Exemplary nucleobases and nucleosides having a modified adenine include without limitation 2-amino-purine, 2,6-diaminopurine, 2-amino-6-halo-purine (e.g., 2-amino-6-chloro-purine), 6-halo-purine (e.g., 6-chloro-purine), 2-amino-6-methyl-purine, 8-azido-adenosine, 7-deaza-adenine, 7-deaza-8-aza-adenine, 7-deaza-2-amino-purine, 7-deaza-8-aza-2-amino-purine, 7-deaza-2,6-diaminopurine, 7-deaza-8-aza-2,6-diaminopurine, 1-methyl-adenosine (m¹A), 2-methyl-adenine (m²A), N6-methyl-adenosine (m⁶A), 2-methylthio-N6-methyl-adenosine (ms2m⁶A), N6-isopentenyl-adenosine (i⁶A), 2-methylthio-N6-isopentenyl-adenosine (ms²i⁶A), N6-(cis-hydroxyisopentenyl) adenosine (io⁶A), 2-methylthio-N6-(cis-hydroxyisopentenyl) adenosine (ms2io⁶A), N6-glycinylcarbamoyl-adenosine (g⁶A), N6-threonylcarbamoyl-adenosine (t⁶A), N6-methyl-N6-threonylcarbamoyl-adenosine (m⁶t⁶A), 2-methylthio-N6-threonylcarbamoyl-adenosine (ms²g⁶A), N6,N6-dimethyl-adenosine (m⁶₂A), N6-hydroxynorvalylcarbamoyl-adenosine (hn⁶A), 2-methylthio-N6-hydroxynorvalylcarbamoyl-adenosine (ms2hn⁶A), N6-acetyl-adenosine (ac⁶A), 7-methyl-adenine, 2-methylthio-adenine, 2-methoxy-adenine, α-thio-adenosine, 2′-O-methyl-adenosine (Am), N⁶,2′-O-dimethyl-adenosine (m⁶Am), N⁶-Methyl-2′-deoxyadenosine, N6,N6,2′-O-trimethyl-adenosine (m⁶₂Am), 1,2′-O-dimethyl-adenosine (m¹Am), 2′-O-ribosyladenosine (phosphate) (Ar(p)), 2-amino-N6-methyl-purine, 1-thio-adenosine, 8-azido-adenosine, 2′-F-ara-adenosine, 2′-F-adenosine, 2′-OH-ara-adenosine, and N6-(19-amino-pentaoxanonadecyl)-adenosine.

### Guanine

[1466] In some embodiments, the modified nucleobase is a modified guanine. Exemplary nucleobases and nucleosides having a modified guanine include without limitation inosine (I), 1-methyl-inosine (m¹I), wyosine (imG), methylwyosine (mimG), 4-demethyl-wyosine (imG-14), isowyosine (imG2), wybutosine (yW), peroxywybutosine (o₂yW), hydroxywybutosine (OHyW), undermodified hydroxywybutosine (OHyW*), 7-deaza-guanosine, queuosine (Q), epoxyqueuosine (oQ), galactosyl-queuosine (galQ), mannosyl-queuosine (manQ), 7-cyano-7-deaza-guanosine (preQ₀), 7-aminomethyl-7-deaza-guanosine (preQ₁), archaeosine (G⁺), 7-deaza-8-aza-guanosine, 6-thio-guanosine, 6-thio-7-deaza-guanosine, 6-thio-7-deaza-8-aza-guanosine, 7-methyl-guanosine (m⁷G), 6-thio-7-methyl-guanosine, 7-methyl-inosine, 6-methoxy-guanosine, 1-methyl-guanosine (m′G), N2-methyl-guanosine (m²G), N2,N2-dimethyl-guanosine (m²₂G), N2,7-dimethyl-guanosine (m²,7G), N2,N2,7-dimethyl-guanosine (m²,2,7G), 8-oxo-guanosine, 7-methyl-8-oxo-guanosine, 1-meth thio-guanosine, N2-methyl-6-thio-guanosine, N2,N2-dimethyl-6-thio-guanosine, α-thio-guanosine, 2′-O-methyl-guanosine (Gm), N2-methyl-2′-O-methyl-guanosine (m²Gm), N2,N2-dimethyl-2′-O-methyl-guanosine (m²₂Gm), 1-methyl-2′-O-methyl-guanosine (m′Gm), N2,7-dimethyl-2′-O-methyl-guanosine (m²,7Gm), 2′-O-methyl-inosine (Im), 1,2′-O-dimethyl-inosine (m′Im), O⁶-phenyl-2′-deoxyinosine, 2′-O-ribosylguanosine (phosphate) (Gr(p)), 1-thio-guanosine, O⁶-methyl-guanosine, 06-Methyl-2′-deoxyguanosine, 2′-F-ara-guanosine, and 2′-F-guanosine.

Modified gRNAs

[1467] In some embodiments, the modified nucleic acids can be modified gRNAs. In some embodiments, gRNAs can be modified at the 3′ end. In this embodiment, the gRNAs can be modified at the 3′ terminal U ribose. For example, the two terminal hydroxyl groups of the U ribose can be oxidized to aldehyde groups and a concomitant opening of the ribose ring to afford a modified nucleoside as shown below:

[chemical structure]

wherein “U” can be an unmodified or modified uridine.

[1468] In another embodiment, the 3′ terminal U can be modified with a 2′3′ cyclic phosphate as shown below:

[chemical structure]

wherein “U” can be an unmodified or modified uridine.

[1469] In some embodiments, the gRNA molecules may contain 3′ nucleotides which can be stabilized against degradation, e.g., by incorporating one or more of the modified nucleotides described herein. In this embodiment, e.g., uridines can be replaced with modified uridines, e.g., 5-(2-amino) propyl uridine, and 5-bromo uridine, or with any of the modified uridines described herein; adenosines and guanosines can be replaced with modified adenosines and guanosines, e.g., with modifications at the 8-position, e.g., 8-bromo guanosine, or with any of the modified adenosines or guanosines described herein. In some embodiments, deaza nucleotides, e.g., 7-deaza-adenosine, can be incorporated into the gRNA. In some embodiments, O- and N-alkylated nucleotides, e.g., N6-methyl adenosine, can be incorporated into the gRNA. In some embodiments, sugar-modified ribonucleotides can be incorporated, e.g., wherein the 2′ OH-group is replaced by a group selected from H, —OR, —R (wherein R can be, e.g., alkyl, cycloalkyl, aryl, aralkyl, heteroaryl or sugar), halo, —SH, —SR (wherein R can be, e.g., alkyl, cycloalkyl, aryl, aralkyl, heteroaryl or sugar), amino (wherein amino can be, e.g., NH₂; alkylamino, dialkylamino, heterocyclyl, arylamino, diarylamino, heteroarylamino, diheteroarylamino, or amino acid); or cyano (—CN). In some embodiments, the phosphate backbone can be modified as described herein, e.g., with a phosphothioate group. In some embodiments, the nucleotides in the overhang region of the gRNA can each independently be a modified or unmodified nucleotide including, but not limited to 2′-sugar modified, such as, 2-F 2′-O-methyl, thymidine (T), 2′-O-methoxyethyl-5-methyluridine (Teo), 2′-O-methoxyethyladenosine (Aeo), 2′-O-methoxyethyl-5-methylcytidine (m5Ceo), and any combinations thereof.

[1470] In an embodiment, one or more or all of the nucleotides in single stranded RNA molecule, e.g., a gRNA molecule, are deoxynucleotides.

miRNA Binding Sites

[1471] microRNAs (or miRNAs) are naturally occurring cellular 19-25 nucleotide long noncoding RNAs. They bind to nucleic acid molecules having an appropriate miRNA binding site, e.g., in the 3′ UTR of an mRNA, and down-regulate gene expression. While not wishing to be bound by theory, in an embodiment, it is believed that the down regulation is either by reducing nucleic acid molecule stability or by inhibiting translation. An RNA species disclosed herein, e.g., an mRNA encoding Cas9 can comprise an miRNA binding site, e.g., in its 3′UTR. The miRNA binding site can be selected to promote down regulation of expression is a selected cell type. By way of example, the incorporation of a binding site for miR-122, a microRNA abundant in liver, can inhibit the expression of the gene of interest in the liver.

Governing gRNA Molecules and the Use Thereof to Limit the Activity of a Cas9 System

[1472] Methods and compositions that use, or include, a nucleic acid, e.g., DNA, that encodes a Cas9 molecule or a gRNA molecule, can, in addition, use or include a “governing gRNA molecule.” The governing gRNA can limit the activity of the other CRISPR/Cas components introduced into a cell or subject. In an embodiment, a gRNA molecule comprises a targeting domain that is complementary to a target domain on a nucleic acid that comprises a sequence that encodes a component of the CRISPR/Cas system that is introduced into a cell or subject. In an embodiment, a governing gRNA molecule comprises a targeting domain that is complementary with a target sequence on: (a) a nucleic acid that encodes a Cas9 molecule; (b) a nucleic acid that encodes a gRNA which comprises a targeting domain that targets the CEP290 gene (a target gene gRNA); or on more than one nucleic acid that encodes a CRISPR/Cas component, e.g., both (a) and (b). The governing gRNA molecule can complex with the Cas9 molecule to inactivate a component of the system. In an embodiment, a Cas9 molecule/governing gRNA molecule complex inactivates a nucleic acid that comprises the sequence encoding the Cas9 molecule. In an embodiment, a Cas9 molecule/governing gRNA molecule complex inactivates the nucleic acid that comprises the sequence encoding a target gene gRNA molecule. In an embodiment, a Cas9 molecule/governing gRNA molecule complex places temporal, level of expression, or other limits, on activity of the Cas9 molecule/target gene gRNA molecule complex. In an embodiment, a Cas9 molecule/governing gRNA molecule complex reduces off-target or other unwanted activity. In an embodiment, a governing gRNA molecule targets the coding sequence, or a control region, e.g., a promoter, for the CRISPR/Cas system component to be negatively regulated. For example, a governing gRNA can target the coding sequence for a Cas9 molecule, or a control region, e.g., a promoter, that regulates the expression of the Cas9 molecule coding sequence, or a sequence disposed between the two. In an embodiment, a governing gRNA molecule targets the coding sequence, or a control region, e.g., a promoter, for a target gene gRNA. In an embodiment, a governing gRNA, e.g., a Cas9-targeting or target gene gRNA-targeting, governing gRNA molecule, or a nucleic acid that encodes it, is introduced separately, e.g., later, than is the Cas9 molecule or a nucleic acid that encodes it. For example, a first vector, e.g., a viral vector, e.g., an AAV vector, can introduce nucleic acid encoding a Cas9 molecule and one or more target gene gRNA molecules, and a second vector, e.g., a viral vector, e.g., an AAV vector, can introduce nucleic acid encoding a governing gRNA molecule, e.g., a Cas9-targeting or target gene gRNA targeting, gRNA molecule. In an embodiment, the second vector can be introduced after the first. In other embodiments, a governing gRNA molecule, e.g., a Cas9-targeting or target gene gRNA targeting, governing gRNA molecule, or a nucleic acid that encodes it, can be introduced together, e.g., at the same time or in the same vector, with the Cas9 molecule or a nucleic acid that encodes it, but, e.g., under transcriptional control elements, e.g., a promoter or an enhancer, that are activated at a later time, e.g., such that after a period of time the transcription of Cas9 is reduced. In an embodiment, the transcriptional control element is activated intrinsically. In an embodiment, the transcriptional element is activated via the introduction of an external trigger.

[1473] Typically a nucleic acid sequence encoding a governing gRNA molecule, e.g., a Cas9-targeting gRNA molecule, is under the control of a different control region, e.g., promoter, than is the component it negatively modulates, e.g., a nucleic acid encoding a Cas9 molecule. In an embodiment, “different control region” refers to simply not being under the control of one control region, e.g., promoter, that is functionally coupled to both controlled sequences. In an embodiment, different refers to “different control region” in kind or type of control region. For example, the sequence encoding a governing gRNA molecule, e.g., a Cas9-targeting gRNA molecule, is under the control of a control region, e.g., a promoter, that has a lower level of expression, or is expressed later than the sequence which encodes is the component it negatively modulates, e.g., a nucleic acid encoding a Cas9 molecule.

[1474] By way of example, a sequence that encodes a governing gRNA molecule, e.g., a Cas9-targeting governing gRNA molecule, can be under the control of a control region (e.g., a promoter) described herein, e.g., human U6 small nuclear promoter, or human H1 promoter. In an embodiment, a sequence that encodes the component it negatively regulates, e.g., a nucleic acid encoding a Cas9 molecule, can be under the control of a control region (e.g., a promoter) described herein, e.g., CMV, EF-1a, MSCV, PGK, CAG control promoters.

### EXAMPLES

[1475] The following Examples are merely illustrative and are not intended to limit the scope or content of the invention in any way.

### Example 1: Cloning and Initial Screening of gRNAs

[1476] The suitability of candidate gRNAs can be evaluated as described in this example. Although described for a chimeric gRNA, the approach can also be used to evaluate modular gRNAs.

Cloning gRNAs into Plasmid Vector

[1477] For each gRNA, a pair of overlapping oligonucleotides is designed and obtained. Oligonucleotides are annealed and ligated into a digested vector backbone containing an upstream U6 promoter and the remaining sequence of a long chimeric gRNA. Plasmid is sequence-verified and prepped to generate sufficient amounts of transfection-quality DNA. Alternate promoters maybe used to drive in vivo transcription (e.g., H1 promoter) or for in vitro transcription (e.g., T7 promoter).

Cloning gRNAs in Linear dsDNA Molecule (STITCHR)

[1478] For each gRNA, a single oligonucleotide is designed and obtained. The U6 promoter and the gRNA scaffold (e.g. including everything except the targeting domain, e.g., including sequences derived from the crRNA and tracrRNA, e.g., including a first complementarity domain; a linking domain; a second complementarity domain; a proximal domain; and a tail domain) are separately PCR amplified and purified as dsDNA molecules. The gRNA-specific oligonucleotide is used in a PCR reaction to stitch together the U6 and the gRNA scaffold, linked by the targeting domain specified in the oligonucleotide. Resulting dsDNA molecule (STITCHR product) is purified for transfection. Alternate promoters may be used to drive in vivo transcription (e.g., H1 promoter) or for in vitro transcription (e.g., T7 promoter). Any gRNA scaffold may be used to create gRNAs compatible with Cas9s from any bacterial species.

Initial gRNA Screen

[1479] Each gRNA to be tested is transfected, along with a plasmid expressing Cas9 and a small amount of a GFP-expressing plasmid into human cells. In preliminary experiments, these cells can be immortalized human cell lines such as 293T, K562 or U2OS. Alternatively, primary human cells may be used. In this case, cells may be relevant to the eventual therapeutic cell target (for example, photoreceptor cells). The use of primary cells similar to the potential therapeutic target cell population may provide important information on gene targeting rates in the context of endogenous chromatin and gene expression.

[1480] Transfection may be performed using lipid transfection (such as Lipofectamine or Fugene) or by electroporation. Following transfection, GFP expression can be determined either by fluorescence microscopy or by flow cytometry to confirm consistent and high levels of transfection. These preliminary transfections can comprise different gRNAs and different targeting approaches (17-mers, 20-mers, nuclease, dual-nickase, etc.) to determine which gRNAs/combinations of gRNAs give the greatest activity.

[1481] Efficiency of cleavage with each gRNA may be assessed by measuring NHEJ-induced indel formation at the target locus by a T7E1-type assay or by sequencing. Alternatively, other mismatch-sensitive enzymes, such as Cell/Surveyor nuclease, may also be used.

[1482] For the T7E1 assay, PCR amplicons are approximately 500-700 bp with the intended cut site placed asymmetrically in the amplicon. Following amplification, purification and size-verification of PCR products, DNA is denatured and re-hybridized by heating to 95° C. and then slowly cooling. Hybridized PCR products are then digested with T7 Endonuclease I (or other mismatch-sensitive enzyme) which recognizes and cleaves non-perfectly matched DNA. If indels are present in the original template DNA, when the amplicons are denatured and re-annealed, this results in the hybridization of DNA strands harboring different indels and therefore lead to double-stranded DNA that is not perfectly matched. Digestion products may be visualized by gel electrophoresis or by capillary electrophoresis. The fraction of DNA that is cleaved (density of cleavage products divided by the density of cleaved and uncleaved) may be used to estimate a percent NHEJ using the following equation: % NHEJ=(1−(1−fraction cleaved)^{1/2}). The T7E1 assay is sensitive down to about 2-5% NHEJ.

[1483] Sequencing may be used instead of, or in addition to, the T7E1 assay. For Sanger sequencing, purified PCR amplicons are cloned into a plasmid backbone, transformed, miniprepped and sequenced with a single primer. For large sequencing numbers, Sanger sequencing may be used for determining the exact nature of indels after determining the NHEJ rate by T7E1.

[1484] Sequencing may also be performed using next generation sequencing techniques. When using next generation sequencing, amplicons may be 300-500 bp with the intended cut site placed asymmetrically. Following PCR, next generation sequencing adapters and barcodes (for example Illumina multiplex adapters and indexes) may be added to the ends of the amplicon, e.g., for use in high throughput sequencing (for example on an Illumina MiSeq). This method allows for detection of very low NHEJ rates.

### Example 2: Assessment of Gene Targeting by NHEJ

[1485] The gRNAs that induce the greatest levels of NHEJ in initial tests can be selected for further evaluation of gene targeting efficiency. For example, cells may be derived from disease subjects, relevant cell lines, and/or animal models and, therefore, harbor the relevant mutation.

[1486] Following transfection (usually 2-3 days post-transfection,) genomic DNA may be isolated from a bulk population of transfected cells and PCR may be used to amplify the target region. Following PCR, gene targeting efficiency to generate the desired mutations (either knockout of a target gene or removal of a target sequence motif) may be determined by sequencing. For Sanger sequencing, PCR amplicons may be 500-700 bp long. For next generation sequencing, PCR amplicons may be 300-500 bp long. If the goal is to knockout gene function, sequencing may be used to assess what percent of alleles have undergone NHEJ-induced indels that result in a frameshift or large deletion or insertion that would be expected to destroy gene function. If the goal is to remove a specific sequence motif, sequencing may be used to assess what percent of alleles have undergone NHEJ-induced deletions that span this sequence.

### Example 3: Assessment of Activity of Individual gRNAs Targeting CEP290

[1487] Guide RNA were identified using a custom guide RNA design software based on the public tool cas-offinder (Bae 2014). Each gRNA to be tested was generated as a STITCHR product and co-transfected with a plasmid expressing either S. aureus Cas9 (pAF003) or S. pyogenes Cas9 (pJDS246) into either HEK293 cells or primary fibroblasts derived from and LCA10 patient harboring homozygous IVS26 c.2991+1655A to G mutations (hereafter referred to as IVS26 fibroblasts). The pAF003 plasmid encodes the S. aureus Cas9, with N-terminal and C-terminal nuclear localization signals (NLS) and a C-terminal triple flag tag, driven by a CMV promoter. The pJDS246 plasmid encodes the S. pyogenes Cas9, with a C-terminal nuclear localization signal (NLS) and a C-terminal triple flag tag, driven by a CMV promoter. gRNA and Cas9-encoding DNA was introduced into cells by either Mirus TransIT-293 transfection reagent (for 293 cells) or by Amaxa nucleofection (for IVS26 fibroblasts). Nucleofection was optimized for transfection of IVS26 fibroblasts using solution P2 and various pulse codes and assaying for highest levels of gene editing and cell viability. Transfection efficiency in both cell types was assessed by transfecting with GFP and assaying expression by fluorescent microscopy. Three to seven days post-transfection, genomic DNA was isolated from bulk populations of transfected cells and the region of the CEP290 locus surrounding the target site was PCR amplified. PCR amplicons were then cloned into a plasmid backbone using the Zero-Blunt TOPO cloning kit (Life Technologies) and transformed into chemically competent Top10 cells. Bacterial colonies were then cultured and plasmid DNA was isolated and sequenced. Sequencing of PCR products allowed for the detection and quantification of targeted insertion and deletion (indel) events at the target site. FIGS. 11A and 11B show the rates of indels induced by various gRNAs at the CEP290 locus. FIG. 11A shows gene editing (% indels) as assessed by sequencing for S. pyogenes and S. aureus gRNAs when co-expressed with Cas9 in patient-derived IVS26 primary fibroblasts. FIG. 11B shows gene editing (% indels) as assessed by sequencing for S. aureus gRNAs when co-expressed with Cas9 in HEK293 cells.

### Example 4: Detection of gRNA Pair-Induced Deletions by PCR

[1488] To assess the ability of a pair of gRNAs to induce a genomic deletion (in which the sequence between the two cut sites is removed), PCR was performed across the predicted deletion. Pairs of gRNAs (encoded as STITCHR products) were co-transfected with pAF003 into IVS26 fibroblasts. Genomic DNA was isolated from transfected cells and PCR was performed to amplify a segment of the CEP290 locus spanning the two predicted cut sites. PCR was run on a QIAxcel capillary electrophoresis machine. The predicted amplicon on a wildtype allele is 1816 bps. Assuming that cleavage occurs within the gRNA target region, amplicon sizes for alleles having undergone the deletion event were calculated and the presence of this smaller band indicates that the desired genomic deletion event has occurred (Table 23).

TABLE 23

| | | | | Amplicon | Deletion |
|---|---|---|---|---|---|
| | | | Deletion | with | amplicon |
| | Left gRNA | Right gRNA | Size | deletion | detected? |
| 1 | CEP290-367 | CEP290-16 | 590 | 1226 | no |
| 2 | CEP290-367 | CEP290-203 | 688 | 1128 | no |
| 3 | CEP290-367 | CEP290-132 | 815 | 1001 | no |
| 4 | CEP290-367 | CEP290-139 | 1265 | 551 | no |
| 5 | CEP290-312 | CEP290-11 | 790 | 1026 | yes |
| 6 | CEP290-312 | CEP290-252 | 973 | 843 | no |
| 7 | CEP290-312 | CEP290-64 | 976 | 840 | yes |
| 8 | CEP290-312 | CEP290-230 | 1409 | 407 | yes |
| 9 | CEP290-12 | CEP290-11 | 19 | 1797 | no |
| 10 | CEP290-12 | CEP290-252 | 202 | 1614 | no |
| 11 | CEP290-12 | CEP290-64 | 205 | 1611 | no |
| 12 | CEP290-12 | CEP290-230 | 638 | 1178 | no |
| 13 | CEP290-17 | CEP290-16 | 19 | 1797 | no |
| 14 | CEP290-17 | CEP290-203 | 117 | 1699 | no |
| 15 | CEP290-17 | CEP290-132 | 244 | 1572 | no |
| 16 | CEP290-17 | CEP290-139 | 693 | 1123 | no |
| 17 | CEP290-374 | CEP290-16 | 799 | 1017 | no |
| 18 | CEP290-374 | CEP290-203 | 897 | 919 | no |
| 19 | CEP290-374 | CEP290-132 | 1024 | 792 | no |
| 20 | CEP290-374 | CEP290-139 | 1473 | 343 | no |
| 21 | CEP290-368 | CEP290-16 | 854 | 962 | no |
| 22 | CEP290-368 | CEP290-203 | 952 | 864 | no |
| 23 | CEP290-368 | CEP290-132 | 1079 | 737 | no |
| 24 | CEP290-368 | CEP290-139 | 1528 | 288 | no |
| 25 | CEP290-323 | CEP290-11 | 990 | 826 | yes |
| 26 | CEP290-323 | CEP290-252 | 1173 | 643 | no |
| 27 | CEP290-323 | CEP290-64 | 1176 | 640 | yes |
| 28 | CEP290-323 | CEP290-230 | 1609 | 207 | yes |

| | | | |
|---|---|---|---|
| 29 | Cas9 only | wt amplicon = | no |
| | | 1816 | |
| 30 | GFP only | wt amplicon = | no |
| | | 1816 | |
| 31 | no DNA PCR neg ctrl | | |

### Example 5: Gene Expression Analysis of CEP290

[1489] Targeted deletion of a region containing the IVS26 splice mutation is predicted to correct the splicing defect and restore expression of the normal wild-type CEP290 allele. To quantify expression of the wild-type and mutant (containing additional cryptic splice mutation) alleles, TaqMan assays were designed. Multiple assays were tested for each RNA species and a single wt and single mutant assay were selected. The assay for the wild-type allele contains a forward primer that anneals in exon 26, a reverse primer that anneals in exon 27 and a TaqMan probe that spans the exon26-exon-27 junction. The assay for the mutant allele contains a forward primer that anneals in exon 26, a reverse primer that anneals in the cryptic exon and a TaqMan probe that spans the exon26-cryptic exon junction. A TaqMan assay designed to beta-actin was used as a control. Total RNA was isolated from IVS26 cells transfected with pairs of gRNAs and Cas9-expressing plasmid by either Trizol RNA purification (Ambion), Agencourt RNAdvance (Beckman Coulter) or direct cells-to-Ct lysis (Life Technologies). Reverse transcription to generate cDNA was performed and cDNA was used as a template for qRT-PCR using selected taqman assays on a BioRad real time PCR machine. Relative gene expression was calculated by ΔΔCt, relative to beta-actin control and GFP-only sample. Increases in expression of wt allele and decreases in expression of mutant allele relative to GFP-only control indicate corrected splicing due to gene targeting. FIGS. 12A-12B show initial qRT-PCR data for pairs of gRNAs that had shown activity as either individual gRNAs (measured as described in Example 3) or as pairs (measured as described in Example 4). Pairs of gRNAs that showed the desired gene expression changes were repeated in replicate experiments and the cumulative qRT-PCR data is shown in FIG. 13 (error bars represent standard error of the mean calculated from 2 to 6 biological replicates per sample).

### Example 6: Quantification of Genomic Deletions by ddPCR

[1490] Droplet digital PCR (ddPCR) is a method for performing digital PCR in which a single PCR reaction is fractionated into 20,000 droplets in a water-oil emulsion and PCR amplification occurs separately in individual droplets. PCR conditions are optimized for a concentration of DNA template such that each droplet contains either one or no template molecules. Assays were designed to perform amplification using BioRad EvaGreen Supermix PCR system with all amplicons ranging in size from 250-350 bp. Control assays were designed to amplify segments of the CEP290 gene at least 5 kb away from the IVS26 c.2991+1655A to G mutation. Assays to detect targeted genomic deletion were designed such that amplification of an allele that has undergone deletion will yield a PCR product in the size range of 250-350 bp and amplification will not occur on a wild-type allele due to the increased distance between forward and reverse primers. PCR conditions were optimized on genomic DNA isolated from 293 cells that had been transfected with pairs of gRNAs and Cas9-expressing plasmid. Deletion assays were verified to generate no positive signal on genomic DNA isolated from unmodified IVS26 fibroblasts. Assays were further tested and optimized on genomic DNA isolated from IVS26 fibroblasts that had been transfected with pairs of gRNAs and Cas9-encoding plasmid. Of the three assays tested for each of two deletions (CEP290-323 and CEP290-11; and CEP290-323 and CEP290-64) and the 4 control assays tested, a single assay was selected for each deletion and a control based on quality data and replicability in the ddPCR assay. FIG. 14 shows deletion rates on three biological replicates calculated by taking the number of positive droplets for the deletion assay and dividing by the number of positive droplets for the control assay.

### Example 7: Cloning AAV Expression Vectors

Cloning saCas9 into an AAV Expression Vector

[1491] The pAF003 plasmid encodes the CMV-driven S. aureus Cas9 (saCas9), with N-terminal and C-terminal nuclear localization signals (NLS) and a C-terminal triple flag tag, followed by a bovine growth hormone poly(A) tail (bGH polyA). BGH polyA tail was substituted with a 60-bp minimal polyA tail to obtain pAF003-minimal-pA. The CMV-driven NLS-saCas9-NLS-3xFlag with the minimal polyA tail was amplified with PCR and subcloned into pTR-UF11 plasmid (ATCC #MBA-331) with KpnI and SphI sites to obtain the pSS3 (pTR-CMV-saCas9-minimal-pA) vector. The CMV promoter sequence can be substituted with EFS promoter (pSS10 vector), or tissue-specific promoters (Table 20, e.g. photo-receptor-specific promoters, e.g. Human GRK1, CRX, NRL, RCVRN promoters, etc.) using SpeI and NotI sites.

Constructing the all-In-One AAV Expression Vector with One gRNA Sequence

[1492] For each individual gRNA sequence, a STITCHR product with a U6 promoter, gRNA, and the gRNA scaffold was obtained by PCR with an oligonucleotide encoding the gRNA sequence. The STITCHR product with one dsDNA molecule of U6-driven gRNA and scaffold was subcloned into pSS3 or pSS10 vectors using KpnI sites flanking the STITCHR product and downstream of the left Inverted Terminal Repeat (ITR) in the AAV vectors. The orientation of the U6-gRNA-scaffold insertion into pSS3 or pSS10 was determined by Sanger sequencing. Alternate promoters may be used to drive gRNA expression (e.g. H1 promoter, 7SK promoter). Any gRNA scaffold sequences compatible with Cas variants from other bacterial species could be incorporated into STITCHR products and the AAV expression vector therein.

Cloning Two gRNA into an AAV Expression Vector

[1493] For each pair of gRNA sequences, two ssDNA oligonucleotides were designed and obtained as the STITCHR primers, i.e. the left STITCHR primer and the right STITCHR primer. Two STITCHR PCR reactions (i.e. the left STITCHR PCR and the right STITCHR PCR) amplified the U6 promoter and the gRNA scaffold with the corresponding STITCHR primer separately. The pSS3 or pSS10 backbone was linearized with KpnI restriction digest. Two dsDNA STITCHR products were purified and subcloned into pSS3 or pSS10 backbone with Gibson Assembly. Due to the unique overlapping sequences upstream and downstream of the STITCHR products, the assembly is unidirectional. The sequences of the constructs were confirmed by Sanger Sequencing. Table 24 lists the names and compositions of AAV expression vectors constructed, including the names of gRNAs targeting human CEP290, the promoter to drive Cas9 expression, and the length of the AAV vector including the Inverted Terminal Repeats (ITRs) from wild type AAV2 genome. Alternative promoters (e.g., H1 promoter or 7SK promoter) or gRNA scaffold sequences compatible with any Cas variants could be adapted into this cloning strategy to obtain the corresponding All-in-One AAV expression vectors with two gRNA sequences.

TABLE 24
Components of AAV expression vectors

| | | | | Length |
|---|---|---|---|---|
| | | | Promoter | including |
| Name | Left gRNA | Right gRNA | of saCas9 | ITRs |
| pSS10 | NA | NA | EFS | 4100 |
| pSS11 | CEP290-64 | CEP290-323 | EFS | 4853 |
| pSS15 | CEP290-64 | NA | EFS | 4491 |
| pSS17 | CEP290-323 | NA | EFS | 4491 |
| pSS30 | CEP290-323 | CEP290-64 | EFS | 4862 |
| pSS31 | CEP290-323 | CEP290-11 | EFS | 4862 |
| pSS32 | CEP290-490 | CEP290-502 | EFS | 4858 |
| pSS33 | CEP290-490 | CEP290-496 | EFS | 4858 |
| pSS34 | CEP290-490 | CEP290-504 | EFS | 4857 |
| pSS35 | CEP290-492 | CEP290-502 | EFS | 4858 |
| pSS36 | CEP290-492 | CEP290-504 | EFS | 4857 |
| pSS3 | NA | NA | CMV | 4454 |
| pSS8 | CEP290-64 | CEP290-323 | CMV | 5207 |
| pSS47 | CEP290-323 | CEP290-64 | CMV | 5216 |
| pSS48 | CEP290-323 | CEP290-11 | CMV | 5216 |
| pSS49 | CEP290-490 | CEP290-502 | CMV | 5212 |
| pSS50 | CEP290-490 | CEP290-496 | CMV | 5212 |
| pSS51 | CEP290-490 | CEP290-504 | CMV | 5211 |
| pSS52 | CEP290-492 | CEP290-502 | CMV | 5212 |
| pSS53 | CEP290-492 | CEP290-504 | CMV | 5211 |
| pSS23 | NA | NA | hGRK1 | 4140 |
| pSS24 | NA | NA | hCRX | 3961 |
| pSS25 | NA | NA | hNRL | 4129 |
| pSS26 | NA | NA | hRCVRN | 4083 |

### Example 8: Assessment of the Functions of all-In-One AAV Expression Vectors

[1494] Each individual AAV expression vectors were transfected into 293T cells with TransIT-293 (Mirus, Inc.) to test their function before being packaged into AAV viral vectors. 293T cells were transfected with the same amount of plasmid and harvested at the same time points. SaCas9 protein expression was assessed by western blotting with primary antibody probing for the triple Flag tag at the C-terminus of saCas9, while loading control was demonstrated by αTubulin expression. Deletion events at IVS26 mutation could be determined by PCR amplification followed by Sanger sequencing or ddPCR. The results are shown in FIG. 15.

### Example 9: Production, Purification and Titering of Recombinant AAV2 Vectors

[1495] Prior to packaging into AAV viral vectors, all AAV expression vector (plasmids) underwent primer walk with Sanger sequencing and function analysis. In recombinant AAV (rAAV), two ITRs flanking the transgene cassettes are the only cis-acting elements from the wild-type AAV. They are critical for packaging intact rAAVs and genome-release for rAAV vectors during transduction. All AAV expression vectors were restriction digested with Smal or XmaI to ensure the presence of two intact ITRs.

[1496] rAAV2 vectors were produced with “Triple Transfection Protocol”: (1) pSS vectors with ITRs and transgene cassettes; (2) pHelper plasmid with E2A, E4, VA genes from Adenovirus; (3) pAAV-RC2 plasmid with Rep and Cap genes from AAV2. These three plasmids were mixed at a mass ratio of 3:6:5 and transfected into HEK293 with polymer or lipid-based transfection reagent (e.g. PEI, PEI max, Lipofectamine, TransIT-293, etc.). 60-72 hours post-transfection, HEK293 cells were harvested and sonicated to release viral vectors. Cell lysates underwent CsCl ultracentrifuge to purify and concentrate the viral vectors. Additional purification procedures were performed to obtain higher purity for biophysical assays, including another round of CsCl ultracentrifuge, or sucrose gradient ultracentrifuge, or affinity chromatography. Viral vectors were dialyzed with 1×DPBS twice before being aliquoted for storage in −80° C. Viral preps can be tittered with Dot-Blot protocol or/and quantitative PCR with probes annealing to sequences on the transgenes. PCR primer sequences are: AACATGCTACGCAGAGAGGGAGTGG (SEQ ID NO: 399) (ITR-Titer-fwd) and CATGAGACAAGGAACCCCTAGTGATGGAG (SEQ ID NO: 400) (ITR-Titer-rev). Reference AAV preps were obtained from the Vector Core at University of North Carolina-Chapel Hill as standards. To confirm the presence of three non-structural viral proteins composing the AAV capsid, viral preps were denatured and probed with anti-AAV VP1/VP2/VP3 monoclonal antibody B1 (American Research Products, Inc. Cat #03-65158) on western blots. The results are shown in FIG. 16.

### Example 10: rAAV-Mediated CEP290 Modification In Vitro

[1497] 293T were transduced with rAAV2 vectors expressing saCas9 with or without gRNA sequences to demonstrate the deletion events near the IVS26 splicing mutant. 293T cells were transduced with rAAV2 viral vectors at an MOI of 1,000 viral genome (vg)/cell or 10,000 vg/cell and harvested at three to seven days post transduction. Western blotting with the primary antibody for Flag (anti-Flag, M2, Sigma-Aldrich) showed that the presence of U6-gRNA-scaffold does not interfere with saCas9 expression. Genomic DNA from 293T was isolated with the Agencourt DNAdvance Kit (Beckman Coulter). Regions including the deletions were PCR amplified from genomic DNA isolated, and analyzed on the QIAxcel capillary electrophoresis machine. Amplicons smaller than the full-length predicted PCR products represent the deletion events in 293T cells. The PCR results are shown in FIG. 17. To further understand the nature of these deletion events, PCR products were cloned into Zero-Blunt TOPO Cloning Kit (Life Technologies) and transformed into chemically competent Top10 cells. Bacterial colonies were then cultured and sequenced using Sanger sequencing. Sequence results were aligned with the wt CEP290 locus for analysis.

### Example 11: AAV Transduction of Genome Editing Systems in Mouse Retinal Explants

[1498] To assess the ability of the AAV vectors described above to transduce CRISPR/Cas9 genome editing systems into retinal cells in situ, an ex vivo explant system was developed. FIG. 27A shows a representative image of an explanted mouse retina on a support matrix, with the tissue indicated by the gray arrow. Explants were harvested at 7- or 10-day time points, and histological, DNA, RNA and/or protein samples were produced. FIG. 27B shows a representative fluorescence micrograph from a retinal explant treated with an AAV vector carrying a GFP reporter, demonstrating successful transduction of an AAV payload in cells in multiple layers of the retina.

[1499] mRNA samples taken from retinal explants further demonstrate that genome editing systems according to the present disclosure are effectively transduced by these AAV vectors: FIG. 28A and FIG. 28B show expression of Cas9 mRNA and gRNA, respectively, normalized to the expression of GAPDH. As expected, untreated samples did not express Cas9 or gRNA, and gRNA was not detected in samples that were not transduced with gRNA coding sequences. Cas9 expression was observed in three AAV constructs in which Cas9 expression was driven by hGRK1, CMV or EFS promoters. The observation of Cas9 mRNA and gRNA in samples transduced with vectors in which Cas9 expression is driven by the retinal photoreceptor cell specific hGRK1 promoter indicates that these vectors can transduce genome editing systems in photoreceptor cells in situ.

[1500] DNA samples from retinal explants treated with AAV vectors were sequenced, and indel species were identified. The AAV vectors used in the mouse explant system included guides with targeting domains specific to the mouse CEP290 gene but targeted to the same region of intron 26 as the human guides presented above; aside from the specific guide sequences used, the AAV vectors used were the same as those described above. Table 30 shows a wild type (WT) mouse sequence, with left and right guide sequences italicized, and three representative indels of +1, −4 and −246 aligned with the WT sequence. In the table, three periods ( . . . ) represent an abbreviation of the sequence read for ease of presentation, while dashes (-) represent alignment gaps and underlined nucleotides represent insertions. Insofar as DNA sequencing of explants treated with AAV vectors utilizing the photoreceptor specific hGRK1 promoter revealed indel formation, these data demonstrate genome editing of a CEP290 target site in retinal photoreceptors.

TABLE 30
Representative Indels in Mouse Retinal Explants

| | |
|---|---|
| WT | CCCTCAAACACATGTCTCACGCAGCTTAGACATTCT...CAGAACTCGGTCAG-CATGCTACAGATAGCTTATCT |
| | (SEQ ID NO: 2788) (SEQ ID NO: 2789) |
| +1 | CCCTCAAACACATGTCTCACGCAGCTTAGACATTCT...CAGAACTCGGTCAGGCATGCTACAGATAGCTTATCT |
| | (SEQ ID NO: 2788) (SEQ ID NO: 2790) |
| −4 | CCCTCAAACACATGTCTCACGCAGCTTAGACATTCT...CAGAACTCGG-----CATGCTACAGATAGCTTATCT |
| | (SEQ ID NO: 2788) (SEQ ID NO: 2791) |
| −246 | CCCTCAAAG---------------------------...---------------CATGCTACAGATAGCTTATCT |
| | (SEQ ID NO: 2792) (SEQ ID NO: 2793) |

[1501] FIG. 29 summarizes the estimated frequencies of particular editing events in individual mouse explants transduced with AAV vectors according to the present disclosure. In samples transduced with AAV vectors in which Cas9 expression was driven by the hGRK1 promoter, deletions of sequences between gRNAs (guide sites) were consistently observed, as were indels at one of the two guide sites. Indels at one of the two guide sites were also observed in explants transduced with CMV and EFS vectors.

[1502] Taken together, these results demonstrate the transduction of CRISPR/Cas9 genome editing systems into cells, including photoreceptor cells, in the intact mouse retina and the editing (including deletion) of a CEP290 target site in retinal photoreceptors in situ.

### Example 12: AAV Transduction of Genome Editing Systems in Primate Retina In Vivo

[1503] To assess the ability of the AAV vectors described above to transduce CRISPR/Cas9 genome editing systems into retinal cells in vivo, a primate subretinal injection procedure was developed. Cynomolgus macaques received a bilateral subretinal injections of an AAV5 vector encoding S. aureus Cas9 operably linked to an EFS, CMV or hGRK promoter sequence, and gRNAs C1 and C2, targeted to an intronic region of the cynomolgus CEP290 gene and comprising targeting sequences as set forth in SEQ ID NOs: 2794 and 2796 respectively (see Table 31). AAV injections were given at dosages of 4×10¹⁰ (low) or 4×10¹¹ (high) viral genomes (vg). Experimental conditions are summarized in Table 32.

TABLE 31
Cynomolgus gRNA Targeting Domain Sequences

| Guide | Targeting Domain Sequence (DNA) | Targeting Domain Sequence (RNA) |
|---|---|---|
| C1 | GGCCGGCTAATTTAGTAGAGA | GGCCGGCUAAUUUAGUAGAGA |
| | (SEQ ID NO: 2794) | (SEQ ID NO: 2795) |
| C2 | GTTATGAAGAATAATACAAA | GUUAUGAAGAAUAAUACAAA |
| | (SEQ ID NO: 2796) | (SEQ ID NO: 2797) |

TABLE 32
Cynomolgus Treatment Conditions

| Group | Vector | Dose (vg/eye) |
|---|---|---|
| CMV-low | CEPgRNAs-dCMV-Cas9 | 4 × 10¹⁰ |
| CMV-high | CEPgRNAs-dCMV-Cas9 | 4 × 10¹¹ |
| EFS-low | CEPgRNAs-EFS-Cas9 | 4 × 10¹⁰ |
| EFS-high | CEPgRNAs-EFS-Cas9 | 4 × 10¹¹ |
| GRK-low | CEPgRNAs-GRK1-Cas9 | 4 × 10¹⁰ |
| GRK-high | CEPgRNAs-GRK1-Cas9 | 4 × 10¹¹ |
| Vehicle | GRK1-GFP/Vehicle | 4 × 10¹¹ |

[1504] 6 or 8 mm retinal tissue punches were obtained from AAV-treated and Vehicle-treated retinas at 6 and 13 weeks post injection, and genomic DNA was harvested. Sequencing was performed by using a proprietary methodology (Uni-Directional Targeted Sequencing, or UDiTaS) described in commonly assigned, copending U.S. Provisional Patent Application No. 62/443,212, which is incorporated by reference herein in its entirety. Data from two UDiTaS sequencing reactions with individual upstream or downstream primers was combined by assuming complete overlap of indels at the two different gRNA cut sites and by averaging the rates of inversions and deletions observed in the two sequencing reactions.

[1505] Histological analysis demonstrated successful transduction of primate photoreceptor cells using genome editing systems as disclosed herein. FIG. 27C depicts Cas9 antibody staining in a vehicle-control tissue punch from a primate retina, while FIG. 27D shows Cas9 expression in a punch from a primate retina treated with an AAV5 vector encoding S. aureus Cas9 operably linked to an hGRK promoter sequence. The figures show that the outer nuclear layer (ONL) in the AAV5 vector-treated punch contains Cas9 protein, while the ONL from the vehicle control punch does not. This demonstrates successful transduction of cells in this layer. No detectable Cas9 expression was detected in cells outside the ONL. Because the hGRK promoter is photoreceptor specific, these data indicate that the systems and methods of this disclosure result in Cas9 expression among retinal photoreceptor cells in primates.

[1506] FIG. 30 shows the frequency with which specific edits (indels, insertions, deletions and inversions, were observed in each condition. In both the CMV-high and GRK-high conditions, the frequency of editing events approached or exceeded 40% of reads at the 13-week timepoints. Frequencies of specific edits observed in each experimental condition at each timepoint are listed in Table 33, below. 13 weeks timepoints for the EFS-high condition were not obtained.

TABLE 33
Editing Frequencies Observed in Cynomolgus
Treatment Conditions at 6 and 13 Weeks

| | | | Total | Inver- | Dele- | Inser- | |
|---|---|---|---|---|---|---|---|
| | | | editing | sions | tions | tions | Indels |
| EFS-low | 6 | week | 2.4% | 0.6% | 0.4% | 0.3% | 1.1% |
| | 13 | week | 3.8% | 1.2% | 0.6% | 0.0% | 2.0% |
| EFS-high | 6 | week | 10.2% | 1.4% | 1.3% | 2.3% | 5.3% |
| | 13 | week | — | — | — | — | — |
| CMV-low | 6 | week | 1.1% | 0.5% | 0.0% | 0.1% | 0.5% |
| | 13 | week | 13.4% | 3.7% | 2.1% | 0.9% | 6.6% |
| CMV-high | 6 | week | 8.0% | 0.7% | 0.7% | 2.1% | 4.4% |
| | 13 | week | 44.5% | 5.1% | 3.7% | 11.2% | 24.5% |
| GRK-low | 6 | week | 5.0% | 0.9% | 0.7% | 0.7% | 2.7% |
| | 13 | week | 1.6% | 0.0% | 0.0% | 0.3% | 1.3% |
| GRK-high | 6 | week | 16.6% | 2.5% | 2.5% | 3.5% | 8.1% |
| | 13 | week | 38.0% | 7.0% | 8.5% | 5.9% | 16.7% |

[1507] It should be noted that the hGRK1 promoter is photoreceptor specific, and that the genome editing system encoded by the AAV5 vector would only be functional in photoreceptor cells. It is reasonable to conclude, therefore, that the percentages of reads obtained from tissue punches, which include other retinal cell types, are lower than the percentages that would be observed in photoreceptor cells alone. Together, these data demonstrate transduction of a CRISPR/Cas9 system into a primate retina by subretinal injection of AAV, in vivo, and the generation of targeted alterations in a CEP290 gene sequence in primate photoreceptor cells in vivo.

### Example 13: Correction of IVS26 Splicing Defect by Inversions and Deletions

[1508] To verify that deletions and inversions of the intronic region including the IVS26 mutation correct the splicing defect observed in CEP290 associated disease, a reporter assay was developed utilizing four reporter constructs having the general design depicted in FIG. 31A: pAD26_SplitGFP+WildType_CEP290_Kan (SEQ ID NO: 2798); ID NO: 2799); pAD27_SplitGFP+Mutant_CEP290_Kan (SEQ pAD28_SplitGFP+Mutant_CEP290_Inverted_Kan (SEQ ID NO: 2800); and pAD29_SplitGFP+DeletionCEP290_Kan (SEQ ID NO: 2801). These constructs were transfected into U2OS cells at the concentrations shown in FIG. 31B, and GFP and mCherry expression was quantitated for each condition across three bioreplicates. Each of the four reporter constructs included a sequence encoding a split-green-fluorescent protein (GFP) reporter gene incorporating a 2217 bp human CEP 290 intron sequence corresponding to (a) wild type (WT), (b) the IVS26 mutation, (c) a deletion of the intronic sequence between two human CEP290 target sites, including the IVS26 mutation and the cryptic exon observed in mRNAs from subjects with CEP290 associated disease, as would result from the use of a genome editing system according to the present disclosure, or (d) an inversion of the intronic sequence between the two human CEP290 target sites, including the IVS26 mutation and the cryptic exon as would result from the use of a genome editing system of this disclosure. The construct is designed such that correct splicing is necessary for GFP expression. Thus, the presence of the cryptic splice acceptor site in the IVS26 condition, but not the WT condition, will result in disrupted GFP transcripts encoding non-functional GFP proteins; modifications at CEP290 target sites that result in the removal or alteration of the IVS26 mutation would rescue the expression of functional GFP protein. As shown in FIG. 31B, functional GFP protein is expressed at a high baseline level in cells treated with the WT construct, expression is reduced in the IVS26 condition, and is returned to the WT baseline level in the deletion and inversion conditions. These data indicate that the aberrant mRNA splicing caused by the IVS26 mutation is rescued by either deletion or inversion of the intronic sequence comprising that mutation.

### Example 14: AAV5 Transduction of Genome Editing Systems in Human Retinal Explants

[1509] To further establish that the genome editing systems of the present disclosure supported targeted gene editing in human retinal cells, e.g., fully mature human photoreceptors in situ, an ex vivo human retina explant system was developed. Purified AAV5 vectors were selected that encoded S. aureus Cas9 operably linked to an hGRK1 or CMV promoter sequence and first and second gRNAs comprising targeting sequences according to SEQ ID NOs: 389 and 388, respectively, and backbone sequences according to SEQ ID NO: 2787. As discussed above, these guides are targeted to the intronic region of the CEP290 gene on opposite sides of the IVS26 A>G mutation (Table 28). Human cadaver donor eyes were obtained within approximately 5 hours post-mortem and 3 mm punches were immobilized on a culture substrate as described above. Retinal explants were treated with AAV vectors at either a low dose of 1×10¹¹ vg or a high dose of 5×10¹¹ vg. Experimental conditions are summarized in Table 34.

TABLE 34
Human Treatment Conditions

| Group | Vector | Dose (vg/punch) |
|---|---|---|
| CMV-low | CEPgRNAs-dCMV-Cas9 | 1 × 10¹¹ |
| CMV-high | CEPgRNAs-dCMV-Cas9 | 5 × 10¹¹ |
| GRK-low | CEPgRNAs-GRK1-Cas9 | 1 × 10¹¹ |
| GRK-high | CEPgRNAs-GRK1-Cas9 | 5 × 10¹¹ |
| Vehicle | GRK1-GFP/Vehicle | 5 × 10¹¹ |

[1510] DNA samples from human retinal explants treated with AAV vectors were sequenced at either 14 or 28 days post-transduction, and inversions and deletions were identified. FIG. 32 summarizes the productive editing observed in human retinal explants 14 and 28 days after transduction with the various AAV vectors. Productive editing was defined as total edits (equal to the sum of the rates of inversions and deletions) capable of correcting the LCA10-associated splice mutation in the CEP290 gene (FIG. 32). The most productive editing was observed at 16.4% at the 28 day time point for the GRK-high condition. These data demonstrate transduction of a CRISPR/Cas9 system into a human retina by subretinal injection of AAV and the generation of targeted alterations in a CEP290 gene sequence in human photoreceptor cells in situ.

### Example 15: AAV5 Transduction of Genome Editing Systems in Live Transgenic IVS26 Knock-In Mice

[1511] To further establish that the genome editing systems of the present disclosure supported targeted gene editing of the human CEP290 target position in mature photoreceptors in vivo, an IVS26 12 KI mouse model was employed. In this model, the human CEP290 exon 26, intron 26 with the IVS26 mutation (13 c.2991+1655A>G) and exon 27 have been inserted into the murine CEP290 gene via homologous recombination. AAV5 vectors encoding (i) S. aureus Cas9 operably linked to the photoreceptor-specific hGRK1 promoter sequence, and (ii) first and second gRNAs comprising targeting sequences according to SEQ ID NOs: 389 and 388, respectively, and having gRNA backbone sequences according to SEQ ID NO: 2787 were used as described in Example 14. The vectors were administered subretinally (toward the temporal side of the retina near the optic nerve) in both eyes of each animal at doses of 1×10¹¹ vg/mL, 1×10¹² vg/mL or 1×10¹³ vg/mL; a vehicle group (containing BSS with 0.014% Tween20) was also used in the study as a control. Subretinal injections were conducted in anesthetized mice in accordance with NIH animal care guidelines. For each injection, a blunt-ended needle (33-gauge, 0.5 in; Hamilton company) on a 5 ml Hamilton syringe was inserted through the scleral incision, posterior to the lens, and was advanced centrally toward the temporal retina until resistance was felt. Care was taken to avoid the damaging the lens as the cannula was advanced. A volume of 1 microliter of AAV formulation or vehicle control containing 0.2 mg/ml of fluorescein was injected into the subretinal space, forming a bleb; fluorescein was used to visualize the bleb and to confirm successful injection. Animals were euthanized at 6- and 12-week timepoints, and retinal genomic DNA and RNA were isolated for determining the gene editing efficiency (by UDiTaS) and Cas9/gRNA levels (by RT_PCR), respectively.

[1512] Experimental conditions are summarized in Table 35, along with rates of insertion and deletion from individual retinas as measured by UDiTaS.

TABLE 35
Inversion and Deletion Rates in IVS26 KI Mouse Retinas

| Dose | |
|---|---|
| 1 × 10¹² vg | 1 × 10¹³ vg |

| Timepoint | 6 weeks | 12 weeks | 6 weeks | 12 weeks |
|---|---|---|---|---|
| Inversions | 4.68% | 3.91% | 2.06% | 1.88% |
| Deletions | 6.29% | 5.27% | 7.79% | 4.13% |

[1513] These data provide further demonstrate the successful transduction of retinal photoreceptor cells and alteration of the LCA10 target position using the vectors and genome editing systems of the present disclosure.

### Example 16: Treatment of Inherited Retinal Dystrophy (e.g., LCA) in Humans Using Recombinant Viral Vectors in Combination with Corticosteroids

[1514] The recombinant viral vectors disclosed herein may be used for the treatment of an Inherited Retinal Dystrophy, such as LCA, in a patient in need thereof. In certain embodiments, the patient may have a mutation in the CEP290 gene. For example, the patient may have a mutation in intron 26 (IVS26) of the CEP290 gene (“LCA10-IVS26”). In certain embodiments, the recombinant viral vectors disclosed herein may be used for the treatment of Inherited Retinal Dystrophy with Centrosomal Protein 290 (CEP290)-Related Retinal Degeneration Caused by a Compound Heterozygous or Homozygous Mutation Involving c.2991+1655A>G in Intron 26 (IVS26) of the CEP290 Gene in patient in need thereof. The recombinant viral vector used to treat the patient may be any of the AAV vectors disclosed herein. In certain embodiments, treatment with the AAV vector results in deletion or inversion of the mutation-containing region in the CEP290 gene, leading to improved photoreceptor and visual function. In certain embodiments, the patient may be an adult or pediatric patient.

[1515] In certain embodiments, the AAV vector may comprise one or more of the AAV vector genomes as set forth in 19A-F, 20A-20F, 21A-21F, 22A-22F, 23A-23F, 24A-24F. In certain embodiments, the AAV vector may comprise one or more of the AAV vector genomes having the configurations as illustrated in FIGS. 25A-25D. In certain embodiments, the AAV vector may comprise one or more sequences set forth in SEQ ID NOs: 428, 445, 429, 446, 430, 447, 431, 448, 432, 449, 433, 450, 2802, or 2803. The AAV vector may comprise a transgene packaged into AAV serotyped with various AAV capsids, for example, AAV5 capsids. The AAV vector may be formulated in balanced salt solution/0.001% poloxamer 188 (BSSP).

[1516] In certain embodiments, the AAV vector may be administered to the patient via sub-retinal injection in the para-foveal region. In certain embodiments, the injection may be a single injection. After completion of a pars plana vitrectomy in the eye to be treated, a subretinal bleb may be formed using the AAV vector as the infusion solution.

[1517] In certain embodiments, the patient may be administered an AAV vector at a dose of 9×10¹⁰ viral genomes (vg) to 9×10¹¹ vg (e.g., 9×10¹⁰ vg, 3×10¹¹ vg, or 9×10¹¹ vg)). For example, in certain embodiments, the AAV vector may be administered to the subject at a dose of 3×10¹¹ vg/ml to 3×10¹² vg/ml (e.g., 3×10¹¹ vg/ml, 1×10¹² vg/ml, or 3×10¹² vg/ml). In certain embodiments, the dose may be administered to the patient in a suitable volume (e.g., 0.3 mL).

[1518] To mitigate ocular inflammation and associated discomfort, the patient may be administered one or more corticosteroids before, at the same time and/or after administration of the AAV vector. In certain embodiments, the corticosteroid may be an oral corticosteroid (e.g., oral prednisone). In certain embodiments, the patient may be administered the corticosteroid prior to administration of the AAV vector. For example, the patient may be administered the corticosteroid in the days prior to administration of the AAV vector (e.g., 3 days prior to administration of the AAV vector). I For example, the corticosteroid treatment may be administered beginning 3 days prior to until 6 weeks after administration of the AAV vector. In certain embodiments, the treatment of corticosteroids may be 0.5 mg/kg/day for 4 weeks, followed by a 15-day taper (0.4 mg/kg/day for 5 days, and then 0.2 mg/kg/day for 5 days, and then 0.1 mg/kg/day for 5 days). The dose of corticosteroid may be changed according to how the patient reacts to the AAV vector. For example, if there is an increase in vitreous inflammation by 1+ on the grading scale while the patient is receiving the 0.5 mg/kg/day dose (i.e., within 4 weeks after surgery), the corticosteroid dose may be may be increased to 1 mg/kg/day. If any inflammation is present within 4 weeks after surgery, the taper may be delayed.

[1519] Primary endpoints may include (a) the incidence of dose-limiting toxicity (DLT), such as macular holes, intraocular inflammation, corneal abrasion, corneal edema, decreased visual acuity, vitreous hemorrhage, subretinal hemorrhage, elevated intraocular pressure, eye pain, eye irritation, dry eye, retinal detachment, cataract, endophthalmitis, and ocular infection; (b) number of adverse events related to the AAV vector; and (c) the number of procedural adverse events. Secondary endpoints may include one or more of the following: (a) maximum tolerated dose as determined by DLT, (b) change from baseline in (i) mobility course score, (ii) log MAR measurement of best-corrected visual acuity, (iii) the rate of change, decrease in latency, or absolute change in pupil size following response to light, (iv) dark adapted visual sensitivity, (v) the thickness of the outer nuclear layer, (vi) the Pelli-Robson assessment (vii) macular sensitivity, (viii) Farnsworth 15 score, (ix) retinal function that is measurable by mfERG, (x) age-range specific quality of life instrument and participant Global Impressions of Change and Severity.

### INCORPORATION BY REFERENCE

[1520] All publications, patents, and patent applications mentioned herein are hereby incorporated by reference in their entirety as if each individual publication, patent or patent application was specifically and individually indicated to be incorporated by reference. In case of conflict, the present application, including any definitions herein, will control.

### EQUIVALENTS

[1521] Those skilled in the art will recognize, or be able to ascertain using no more than routine experimentation, many equivalents to the specific embodiments of the invention described herein. Such equivalents are intended to be encompassed by the following claims.

### REFERENCES

[1522] 1. Altschul et al. Nucleic Acids Res 25(17):3389-3402 (1977)
[1523] 2. Altschul et al. J Mol Biol 215(3):403-410 (1990)
[1524] 3. Ambati et al. Invest Ophthalmol Vis Sci 41(5):1181-1185 (2000a)
[1525] 4. Ambati et al. Invest Ophthalmol Vis Sci 41(5):1186-1191 (2000b)
[1526] 5. Anders et al. Nature 513(7519):569-573 (2014)
[1527] 6. Baal et al. Am J Hum Genet 81(1):170-179 (2007)
[1528] 7. Bae et al. Bioinformatics 30(10):1473-1475 (2014)
[1529] 8. Bainbridge et al. N Engl J Med 358(21):2231-2239 (2008)
[1530] 9. Briner et al. Mol Cell 56(2):333-339 (2014)
[1531] 10. Chylinski et al. RNA Biol 10(5):726-737 (2013)
[1532] 11. Cideciyan et al. Proc Natl Acad Sci USA 105(39):15112-15117 (2008)
[1533] 12 Cong et al. Science 339(6121):819-823 (2013)
[1534] 13. Coppieters et al. Hum Mutat 31(10):E1709-E1766 (2010)
[1535] 14. Cornish-Bowden Nucleic Acids Res 13(9):3021-3030 (1985)
[1536] 15. Davis & Maizels Proc Natl Acad Sci USA 111(10):E924-E932 (2014)
[1537] 16. den Hollander et al. Am J Hum Genet 79(3):556-561 (2006)
[1538] 17. den Hollander et al. Prog Retin Eye Res 27(4):391-419 (2008)
[1539] 18. Deveau et al. J Bacteriol 190(4):1390-1400 (2008)
[1540] 19. den Hollander et al. J Clin Invest 120(9):3042-3053 (2010)
[1541] 20. Estrada-Cuzcano et al., Invest Ophthalmol Vis Sci. 52(2): 834-9, 2011
[1542] 21 Esvelt et al. Nature 472(7344):499-503 (2011)
[1543] 22. Fine et al. Sci Rep 5:10777 (2015)
[1544] 23. Frit et al. DNA Repair (Amst.) 17:81-97 (2014)
[1545] 24 Fu et al. Nat Biotechnol 32(3):279-284 (2014)
[1546] 25 Haft et al. PLOS Comput Biol 1(6):e60 (2005)
[1547] 26. Hauswirth et al. N Engl J Med 358(21):2240-2248 (2008)
[1548] 27 Heigwer et al. Nat Methods 11(2):122-123 (2014)
[1549] 28. Helou et al. J Med Genet 44(10):657-663 (2007)
[1550] 29. Horvath et al. Science 327(5962):167-170 (2010)
[1551] 30. Hou et al. Proc Natl Acad Sci USA 110(39):15644-15649 (2013)
[1552] 31. Hsu et al. Nat Biotechnol 31(9):827-832 (2013)
[1553] 32. Iyama & Wilson DNA Repair (Amst.) 12(8):620-636 (2013)
[1554] 33. Jiang et al. Nat Biotechnol 31(3): 233-239 (2013)
[1555] 34. Jinek et al. Science 337(6096):816-821 (2012)
[1556] 35. Jinek et al. Science 343(6176):1247997 (2014)
[1557] 36. Karvelis et al. RNA Biol 10(5):841-851 (2013)
[1558] 37. Kleinstiver et al. Nature 523(7561):481-485 (2015a)
[1559] 38. Kleinstiver et al. Nat Biotechnol 33(12):1293-1298 (2015b)
[1560] 39. Kleinstiver et al. Nature 529(7587):490-495 (2016)
[1561] 40 Koenekoop et al. Clin Exp Ophthalmol 35(5):473-485 (2007)
[1562] 41. Komor et al. Nature 533(7603):420-424 (2016)
[1563] 42. Leber Archiv für Ophthalmologie (in German) 15(3):1-25 (1869)
[1564] 43. Li Cell Res 18(1):85-98 (2008)
[1565] 44. Littink et al. Invest Ophthalmol Vis Sci 51(7):3646-3652 (2010)
[1566] 45 Maguire et al. N Engl J Med 358(21):2240-2248 (2008)
[1567] 46 Maguire et al. Lancet 374(9701):1597-1605 (2009)
[1568] 47. Makarova et al. Nat Rev Microbiol 9(6):467-477 (2011)
[1569] 48. Mali et al. Science 339(6121):823-826 (2013)
[1570] 49. Marteijn et al. Nat Rev Mol Cell Biol 15(7):465-481 (2014)
[1571] 50. Myers & Miller Comput Appl Biosci 4(1):11-17 (1988)
[1572] 51 Needleman & Wunsch J Mol Biol 48(3):443-453 (1970)
[1573] 52. Nishimasu et al. Cell 156(5):935-949 (2014)
[1574] 53. Nishimasu et al. Cell 162(5):1113-1126 (2015)
[1575] 54 Pearson & Lipman Proc Natl Acad Sci USA 85(8):2444-2448 (1988)
[1576] 55 Perrault et al. Hum Mutat 28(4):416 (2007)
[1577] 56. Ran et al. Cell 154(6):1380-1389 (2013)
[1578] 57. Smith & Waterman Adv Appl Math 2(4):482-489 (1981)
[1579] 58. Sternberg et al. Nature 507(7490):62-67 (2014)
[1580] 59. Stone Am J Ophthalmol 144(6):791-811 (2007)
[1581] 60. Stone Opthamology 124(9):1314-1331 (2017)
[1582] 61. Tsai et al. Nat Biotechnol 34(5):483 (2016)
[1583] 62. Valente et al. Nat Genet 38(6):623-625 (2006)
[1584] 63. Wang et al. Cell 153(4):910-918 (2013)
[1585] 64 Xiao et al. Bioinformatics 30(8):1180-1182 (2014)
[1586] 65. Zetsche et al. Nat Biotechnol 33(2):139-142 (2015)

1-568. (canceled)

569. A composition comprising
a recombinant viral vector comprising a sequence encoding a first guide RNA (gRNA) and a sequence encoding a Cas9,
wherein (a) the first gRNA is adapted to form a first ribonucleoprotein complex with the Cas9, and (b) the first ribonucleoprotein complex is adapted to cleave a first cellular nucleic acid sequence associated with an inherited retinal dystrophy, thereby altering the first cellular nucleic acid sequence,
the recombinant viral vector further comprising
a promoter sequence selected from the group consisting of:
a CMV promoter sequence having at least 90% sequence identity to SEQ ID NO: 401,
an EFS promoter sequence having at least 90% sequence identity to SEQ ID NO: 402, and
an hGRK promoter sequence having at least 90% sequence identity to SEQ ID NO: 403,
wherein the promoter sequence is operably coupled to a sequence encoding an S. aureus Cas9.

570. The composition of claim 569, wherein the recombinant viral vector further comprises:
a left inverted terminal repeat (ITR) sequence having at least 90% sequence identity to a sequence selected from the group consisting of SEQ ID NOs: 407-415; and
a right ITR sequence having at least 90% sequence identity to a sequence selected from the group consisting of SEQ ID NOs: 436-444.

571. The composition of claim 570, wherein the Cas9 comprises an amino acid sequence having at least 90% sequence identity to SEQ ID NO: 26.

572. The composition of claim 571, wherein the recombinant viral vector further comprises a U6 promoter sequence having at least 90% sequence identity to SEQ ID NO: 417, wherein the U6 promoter sequence is operably coupled to the sequence encoding the first gRNA.

573. The composition of claim 572, wherein (c) the recombinant viral vector further comprises a sequence encoding a second gRNA, (d) the second gRNA is adapted to form a second ribonucleoprotein complex with the Cas9, and (e) the second ribonucleoprotein complex is adapted to cleave a second cellular nucleic acid sequence associated with the inherited retinal dystrophy, thereby altering the second cellular nucleic acid sequence.

574. The composition of claim 573, wherein the inherited retinal dystrophy is selected from the group consisting of Senior-Loken syndrome, Meckel Gruber syndrome, Bardet-Biedle syndrome, Joubert Syndrome, and Leber Congenital Amaurosis.

575. The composition of claim 569, wherein the recombinant viral vector comprises a sequence having at least 90% sequence identity to a sequence selected from SEQ ID NOs: 2785 and 2787.

576. A kit comprising:
a first guide RNA (gRNA) or a sequence encoding the first gRNA; and
a Cas9 or a sequence encoding the Cas9;
wherein (a) the first gRNA is adapted to form a first ribonucleoprotein complex with the Cas9, and (b) the first ribonucleoprotein complex is adapted to cleave a first cellular nucleic acid sequence associated with an inherited retinal dystrophy, thereby altering the first cellular nucleic acid sequence.

577. The kit of claim 576, wherein the kit comprises a recombinant viral vector comprising the sequence encoding the first gRNA and the sequence comprising the Cas9,
the recombinant vector further comprising:
a left inverted terminal repeat (ITR) sequence having at least 90% sequence identity to a sequence selected from the group consisting of SEQ ID NOs: 407-415;
a right ITR sequence having at least 90% sequence identity to a sequence selected from the group consisting of SEQ ID NOs: 436-444; and
a promoter sequence selected from the group consisting of:
a CMV promoter sequence having at least 90% sequence identity to SEQ ID NO: 401,
an EFS promoter sequence having at least 90% sequence identity to SEQ ID NO: 402, and
an hGRK promoter sequence having at least 90% sequence identity to SEQ ID NO: 403,
wherein the promoter sequence is operably coupled to a sequence encoding an S. aureus Cas9.

578. The kit of claim 577, wherein the Cas9 comprises an amino acid sequence having at least 90% sequence identity to SEQ ID NO: 26.

579. The kit of claim 578, wherein the recombinant viral vector further comprises a U6 promoter sequence having at least 90% sequence identity to SEQ ID NO: 417, and wherein the U6 promoter sequence is operably coupled to the sequence encoding the first gRNA.

580. The kit of claim 579, wherein (c) the recombinant viral vector further comprises a sequence encoding a second gRNA, (d) the second gRNA is adapted to form a second ribonucleoprotein complex with the Cas9, and (e) the second ribonucleoprotein complex is adapted to cleave a second cellular nucleic acid sequence associated with the inherited retinal dystrophy, thereby altering the second cellular nucleic acid sequence.

581. The kit of claim 576, wherein the kit comprises a recombinant viral vector comprising the sequence encoding the first gRNA and the sequence encoding the Cas9,
wherein the recombinant viral vector comprises a sequence having at least 90% sequence identity to a sequence selected from SEQ ID NOs: 2785 and 2787.

582. A method of treating a subject having an inherited retinal dystrophy, comprising:
contacting a retina of the subject with a recombinant viral vector comprising a sequence encoding a first guide RNA (gRNA) and a sequence comprising a Cas9;
wherein (a) the first gRNA is adapted to form a first ribonucleoprotein complex with the Cas9, and (b) the first ribonucleoprotein complex is adapted to cleave a first cellular nucleic acid sequence associated with the inherited retinal dystrophy, thereby altering the first cellular nucleic acid sequence.

583. The method of claim 582, wherein the recombinant viral vector further comprises:
a left inverted terminal repeat (ITR) sequence having at least 90% sequence identity to a sequence selected from the group consisting of SEQ ID NOs: 407-415;
a right ITR sequence having at least 90% sequence identity to a sequence selected from the group consisting of SEQ ID NOs: 436-444; and
a promoter sequence selected from the group consisting of:
a CMV promoter sequence having at least 90% sequence identity to SEQ ID NO: 401,
an EFS promoter sequence having at least 90% sequence identity to SEQ ID NO: 402, and
an hGRK promoter sequence having at least 90% sequence identity to SEQ ID NO: 403,
wherein the promoter sequence is operably coupled to a sequence encoding an S. aureus Cas9.

584. The method of claim 583, wherein the Cas9 comprises an amino acid sequence having at least 90% sequence identity to SEQ ID NO: 26.

585. The method of claim 584, wherein the recombinant viral vector further comprises a U6 promoter sequence having at least 90% sequence identity to SEQ ID NO: 417, and wherein the U6 promoter sequence is operably coupled to the sequence encoding the first gRNA.

586. The method of claim 585, wherein (c) the recombinant viral vector further comprises a sequence encoding a second gRNA, (d) the second gRNA is adapted to form a second ribonucleoprotein complex with the Cas9, and (e) the second ribonucleoprotein complex is adapted to cleave a second cellular nucleic acid sequence associated with the inherited retinal dystrophy, thereby altering the second cellular nucleic acid sequence.

587. The method of claim 586, wherein the inherited retinal dystrophy is selected from the group consisting of Senior-Loken syndrome, Meckel Gruber syndrome, Bardet-Biedle syndrome, Joubert Syndrome, and Leber Congenital Amaurosis.

588. The method of claim 582, wherein the recombinant viral vector comprises a sequence having at least 90% sequence identity to a sequence selected from SEQ ID NOs: 2785 and 2787.

The application's sequence listing, which the Patent Office published only in electronic form, follows.

SEQUENCE LISTING (2804 sequences)

SEQ ID NO: 1 - protein, 1345 aa, Streptococcus mutans
MKKPYSIGLDIGTNSVGWAVVTDDYKVPAKKMKVLGNTDKSHIEKNLLGALLFDSGNTAEDRRLKRTARRRYTRRRNRILYLQEIFSEEMGKVDDSFFHRLEDSFLVTEDKRGERHPIFGNLEEEVKYHENFPTIYHLRQYLADNPEKVDLRLVYLALAHIIKFRGHFLIEGKFDTRNNDVQRLFQEFLAVYDNTFENSSLQEQNVQVEEILTDKISKSAKKDRVLKLFPNEKSNGRFAEFLKLIVGNQADFKKHFELEEKAPLQFSKDTYEEELEVLLAQIGDNYAELFLSAKKLYDSILLSGILTVTDVGTKAPLSASMIQRYNEHQMDLAQLKQFIRQKLSDKYNEVFSDVSKDGYAGYIDGKTNQEAFYKYLKGLLNKIEGSGYFLDKIEREDFLRKQRTFDNGSIPHQIHLQEMRAIIRRQAEFYPFLADNQDRIEKLLTFRIPYYVGPLARGKSDFAWLSRKSADKITPWNFDEIVDKESSAEAFINRMTNYDLYLPNQKVLPKHSLLYEKFTVYNELTKVKYKTEQGKTAFFDANMKQEIFDGVFKVYRKVTKDKLMDFLEKEFDEFRIVDLTGLDKENKVFNASYGTYHDLCKILDKDFLDNSKNEKILEDIVLTLTLFEDREMIRKRLENYSDLLTKEQVKKLERRHYTGWGRLSAELIHGIRNKESRKTILDYLIDDGNSNRNFMQLINDDALSFKEEIAKAQVIGETDNLNQVVSDIAGSPAIKKGILQSLKIVDELVKIMGHQPENIVVEMARENQFTNQGRRNSQQRLKGLTDSIKEFGSQILKEHPVENSQLQNDRLFLYYLQNGRDMYTGEELDIDYLSQYDIDHIIPQAFIKDNSIDNRVLTSSKENRGKSDDVPSKDVVRKMKSYWSKLLSAKLITQRKFDNLTKAERGGLTDDDKAGFIKRQLVETRQITKHVARILDERFNTETDENNKKIRQVKIVTLKSNLVSNFRKEFELYKVREINDYHHAHDAYLNAVIGKALLGVYPQLEPEFVYGDYPHFHGHKENKATAKKFFYSNIMNFFKKDDVRTDKNGEIIWKKDEHISNIKKVLSYPQVNIVKKVEEQTGGFSKESILPKGNSDKLIPRKTKKFYWDTKKYGGFDSPIVAYSILVIADIEKGKSKKLKTVKALVGVTIMEKMTFERDPVAFLERKGYRNVQEENIIKLPKYSLFKLENGRKRLLASARELQKGNEIVLPNHLGTLLYHAKNIHKVDEPKHLDYVDKHKDEFKELLDVVSNFSKKYTLAEGNLEKIKELYAQNNGEDLKELASSFINLLTFTAIGAPATFKFFDKNIDRKRYTSTTEILNATLIHQSITGLYETRIDLNKLGGD

SEQ ID NO: 2 - protein, 1368 aa, Streptococcus pyogenes [sequence omitted]

SEQ ID NO: 3 - protein, 1388 aa, Streptococcus thermophilus
MTKPYSIGLDIGTNSVGWAVTTDNYKVPSKKMKVLGNTSKKYIKKNLLGVLLFDSGITAEGRRLKRTARRRYTRRRNRILYLQEIFSTEMATLDDAFFQRLDDSFLVPDDKRDSKYPIFGNLVEEKAYHDEFPTIYHLRKYLADSTKKADLRLVYLALAHMIKYRGHFLIEGEFNSKNNDIQKNFQDFLDTYNAIFESDLSLENSKQLEEIVKDKISKLEKKDRILKLFPGEKNSGIFSEFLKLIVGNQADFRKCFNLDEKASLHFSKESYDEDLETLLGYIGDDYSDVFLKAKKLYDAILLSGFLTVTDNETEAPLSSAMIKRYNEHKEDLALLKEYIRNISLKTYNEVFKDDTKNGYAGYIDGKTNQEDFYVYLKKLLAEFEGADYFLEKIDREDFLRKQRTFDNGSIPYQIHLQEMRAILDKQAKFYPFLAKNKERIEKILTFRIPYYVGPLARGNSDFAWSIRKRNEKITPWNFEDVIDKESSAEAFINRMTSFDLYLPEEKVLPKHSLLYETFNVYNELTKVRFIAESMRDYQFLDSKQKKDIVRLYFKDKRKVTDKDIIEYLHAIYGYDGIELKGIEKQFNSSLSTYHDLLNIINDKEFLDDSSNEAIIEEIIHTLTIFEDREMIKQRLSKFENIFDKSVLKKLSRRHYTGWGKLSAKLINGIRDEKSGNTILDYLIDDGISNRNFMQLIHDDALSFKKKIQKAQIIGDEDKGNIKEVVKSLPGSPAIKKGILQSIKIVDELVKVMGGRKPESIVVEMARENQYTNQGKSNSQQRLKRLEKSLKELGSKILKENIPAKLSKIDNNALQNDRLYLYYLQNGKDMYTGDDLDIDRLSNYDIDHIIPQAFLKDNSIDNKVLVSSASNRGKSDDVPSLEVVKKRKTFWYQLLKSKLISQRKFDNLTKAERGGLSPEDKAGFIQRQLVETRQITKHVARLLDEKFNNKKDENNRAVRTVKIITLKSTLVSQFRKDFELYKVREINDFHHAHDAYLNAVVASALLKKYPKLEPEFVYGDYPKYNSFRERKSATEKVYFYSNIMNIFKKSISLADGRVIERPLIEVNEETGESVWNKESDLATVRRVLSYPQVNVVKKVEEQNHGLDRGKPKGLFNANLSSKPKPNSNENLVGAKEYLDPKKYGGYAGISNSFTVLVKGTIEKGAKKKITNVLEFQGISILDRINYRKDKLNFLLEKGYKDIELIIELPKYSLFELSDGSRRMLASILSTNNKRGEIHKGNQIFLSQKFVKLLYHAKRISNTINENHRKYVENHKKEFEELFYYILEFNENYVGAKKNGKLLNSAFQSWQNHSIDELCSSFIGPTGSERKGLFELTSRGSAADFEFLGVKIPRYRDYTPSSLLKDATLIHQSVTGLYETRIDLAKLGEG

SEQ ID NO: 4 - protein, 1333 aa, Listeria innocua
KKPYTIGLDIGTNSVGWAVLTDQYDLVKRKMKIAGDSEKKQIKKNFWGVRLFDEGQTAADRRMARTARRRIERRRNRISYLQGIFAEEMSKTDANFFCRLSDSFYVDNEKRNSRHPFFATIEEEVEYHKNYPTIYHLREELVNSSEKADLRLVYLALAHIIKYRGNFLIEGALDTQNTSVDGIYKQFIQTYNQVFASGIEDGSLKKLEDNKDVAKILVEKVTRKEKLERILKLYPGEKSAGMFAQFISLIVGSKGNFQKPFDLIEKSDIECAKDSYEEDLESLLALIGDEYAELFVAAKNAYSAVVLSSIITVAETETNAKLSASMIERFDTHEEDLGELKAFIKLHLPKHYEEIFSNTEKHGYAGYIDGKTKQADFYKYMKMTLENIEGADYFIAKIEKENFLRKQRTFDNGAIPHQLHLEELEAILHQQAKYYPFLKENYDKIKSLVTFRIPYFVGPLANGQSEFAWLTRKADGEIRPWNIEEKVDFGKSAVDFIEKMTNKDTYLPKENVLPKHSLCYQKYLVYNELTKVRYINDQGKTSYFSGQEKEQIFNDLFKQKRKVKKKDLELFLRNMSHVESPTIEGLEDSFNSSYSTYHDLLKVGIKQEILDNPVNTEMLENIVKILTVFEDKRMIKEQLQQFSDVLDGVVLKKLERRHYTGWGRLSAKLLMGIRDKQSHLTILDYLMNDDGLNRNLMQLINDSNLSFKSIIEKEQVTTADKDIQSIVADLAGSPAIKKGILQSLKIVDELVSVMGYPPQTIVVEMARENQTTGKGKNNSRPRYKSLEKAIKEFGSQILKEHPTDNQELRNNRLYLYYLQNGKDMYTGQDLDIHNLSNYDIDHIVPQSFITDNSIDNLVLTSSAGNREKGDDVPPLEIVRKRKVFWEKLYQGNLMSKRKFDYLTKAERGGLTEADKARFIHRQLVETRQITKNVANILHQRFNYEKDDHGNTMKQVRIVTLKSALVSQFRKQFQLYKVRDVNDYHHAHDAYLNGVVANTLLKVYPQLEPEFVYGDYHQFDWFKANKATAKKQFYTNIMLFFAQKDRIIDENGEILWDKKYLDTVKKVMSYRQMNIVKKTEIQKGEFSKATIKPKGNSSKLIPRKTNWDPMKYGGLDSPNMAYAVVIEYAKGKNKLVFEKKIIRVTIMERKAFEKDEKAFLEEQGYRQPKVLAKLPKYTLYECEEGRRRMLASANEAQKGNQQVLPNHLVTLLHHAANCEVSDGKSLDYIESNREMFAELLAHVSEFAKRYTLAEANLNKINQLFEQNKEGDIKAIAQSFVDLMAFNAMGAPASFKFFETTIERKRYNNLKELLNSTIIYQSITGLYESRKRLDD

SEQ ID NO: 5 - RNA, 96 nt, synthetic construct
  misc_difference 1..96: note = gRNA
  misc_difference 1..20: note = Targeting domain, each n is a, c, u, g, unknown, or other
  source 1..96: mol_type = other RNA
nnnnnnnnnnnnnnnnnnnngttttagagctagaaatagcaagttaaaataaggctagtccgttatcaacttgaaaaagtggcaccgagtcggtgc

SEQ ID NO: 6-8 - skipped (3 entries)

SEQ ID NO: 9 - protein, 12 aa, synthetic construct
  VAR_SEQ 1..12: note = N-term RuvC domain
  VAR_SEQ 2: note = Ile, Val, Met, Leu, or Thr
  VAR_SEQ 4: note = Thr, Ile, Val, Ser, Asn, Tyr, Glu, or Leu
  VAR_SEQ 5: note = Asn, Ser, Gly, Ala, Asp, Thr, Arg, Met, or Phe
  VAR_SEQ 7: note = Val, Ile, Leu, Cys, Thr, Phe
  VAR_SEQ 9: note = Trp, Phe, Val, Tyr, Ser, or Leu
  VAR_SEQ 10: note = Ala, Ser, Cys, Val, or Gly
  VAR_SEQ 11: note = Val, Ile, Leu, Ala, Met, or His
  VAR_SEQ 12: note = Any amino acid or absent
DXGXXSXGXXXX

SEQ ID NO: 10 - protein, 12 aa, synthetic construct
  VAR_SEQ 1..12: note = N-term RuvC domain
  VAR_SEQ 4: note = Thr, Ile, Val, Ser, Asn, Tyr, Glu, or Leu
  VAR_SEQ 5: note = Asn, Ser, Gly, Ala, Asp, Thr, Arg, Met, or Phe
  VAR_SEQ 11: note = Val, Ile, Leu, Ala, Met, or His
  VAR_SEQ 12: note = Any amino acid or absent
DIGXXSVGWAXX

SEQ ID NO: 11 - protein, 12 aa, synthetic construct
  VAR_SEQ 1..12: note = N-term RuvC domain
  VAR_SEQ 12: note = Any non-polar alkyl amino acid or a hydroxyl amino acid
DIGTNSVGWAVX

SEQ ID NO: 12 - protein, 8 aa, synthetic construct
  VAR_SEQ 1..8: note = N-term RuvC domain
  VAR_SEQ 2: note = Val or His
  VAR_SEQ 3: note = Ile, Leu, or Val
  VAR_SEQ 5: note = Met or Thr
IXXEXARE

SEQ ID NO: 13 - protein, 8 aa, synthetic construct
  VAR_SEQ 1..8: note = N-term RuvC domain
  VAR_SEQ 3: note = Ile, Leu, or Val
IVXEMARE

SEQ ID NO: 14 - protein, 8 aa, synthetic construct
  VAR_SEQ 1..8: note = N-term RuvC domain
  VAR_SEQ 4: note = His or Leu
  VAR_SEQ 7: note = Arg or Val
  VAR_SEQ 8: note = Glu or Val
HHAXDAXX

SEQ ID NO: 15 - protein, 8 aa, synthetic construct
  VAR_SEQ 1..8: note = RuvC domain
HHAHDAYL

SEQ ID NO: 16 - protein, 30 aa, synthetic construct
  VAR_SEQ 1..30: note = Sequence flanking RuvC domain
  VAR_SEQ 2: note = Lys or Pro
  VAR_SEQ 4: note = Val, Leu, Ile, or Phe
  VAR_SEQ 5: note = Gly, Ala, or Ser
  VAR_SEQ 6: note = Xaa can be any naturally occurring amino acid
  VAR_SEQ 7..26: note = Any amino acid, and region may encompass 5-20 residues wherein some positions may be absent
  VAR_SEQ 29: note = Asp, Glu, Asn, or Gln
KXYXXXXXXXXXXXXXXXXXXXXXXXTDXY

SEQ ID NO: 17 - protein, 27 aa, synthetic construct
  VAR_SEQ 1..27: note = HNH-like domain
  VAR_SEQ 1: note = Asp, Glu, Gln, or Asn
  VAR_SEQ 2: note = Leu, Ile, Arg, Gln, Val, Met, or Lys
  VAR_SEQ 3: note = Asp or Glu
  VAR_SEQ 5: note = Ile, Val, Thr, Ala, or Leu
  VAR_SEQ 6: note = Val, Tyr, Ile, Leu, Phe, or Trp
  VAR_SEQ 8: note = Gln, His, Arg, Lys, Tyr, Ile, Leu, Phe, or Trp
  VAR_SEQ 9: note = Ser, Ala, Asp, Thr, or Lys
  VAR_SEQ 10: note = Phe, Leu, Val, Lys, Tyr, Met, Ile, Arg, Ala, Glu, Asp, or Gln
  VAR_SEQ 11: note = Leu, Arg, Thr, Ile, Val, Ser, Cys, Tyr, Lys, Phe, or Gly
  VAR_SEQ 12: note = Lys, Gln, Tyr, Thr, Phe, Leu, Trp, Met, Ala, Glu, Gly, or Ser
  VAR_SEQ 13: note = Asp, Ser, Asn, Arg, Leu, or Thr
  VAR_SEQ 14: note = Asp, Asn, or Ser
  VAR_SEQ 15: note = Ser, Ala, Thr, Gly, or Arg
  VAR_SEQ 16: note = Ile, Leu, Phe, Ser, Arg, Tyr, Gln, Trp, Asp, Lys, or His
  VAR_SEQ 17: note = Asp, Ser, Ile, Asn, Glu, Ala, His, Phe, Leu, Gln, Met, Gly, Tyr, or Val
  VAR_SEQ 19: note = Lys, Leu, Arg, Met, Thr, or Phe
  VAR_SEQ 20: note = Val, Leu, Ile, Ala, or Thr
  VAR_SEQ 21: note = Leu, Ile, Val, or Ala
  VAR_SEQ 22: note = Thr, Val, Cys, Glu, Ser, or Ala
  VAR_SEQ 23: note = Arg, Phe, Thr, Trp, Glu, Leu, Asn, Cys, Lys, Val, Ser, Gln, Ile, Tyr, His, or Ala
  VAR_SEQ 24: note = Ser, Pro, Arg, Lys, Asn, Ala, His, Gln, Gly, or Leu
  VAR_SEQ 25: note = Asp, Gly, Thr, Asn, Ser, Lys, Ala, Ile, Glu, Leu, Gln, Arg, or Tyr
  VAR_SEQ 26: note = Lys, Val, Ala, Glu, Tyr, Ile, Cys, Leu, Ser, Thr, Gly, Lys, Met, Asp, or Phe
XXXHXXPXXXXXXXXXXNXXXXXXXXN

SEQ ID NO: 18 - protein, 27 aa, synthetic construct
  VAR_SEQ 1..27: note = HNH-like domain
  VAR_SEQ 1: note = Asp or Glu
  VAR_SEQ 2: note = Leu, Ile, Arg, Gln, Val, Met, or Lys
  VAR_SEQ 3: note = Asp or Glu
  VAR_SEQ 5: note = Ile, Val, Thr, Ala, or Leu
  VAR_SEQ 6: note = Val, Tyr, Ile, Leu, Phe, or Trp
  VAR_SEQ 8: note = Gln, His, Arg, Lys, Tyr, Ile, Leu, Phe, or Trp
  VAR_SEQ 10: note = Phe, Leu, Val, Lys, Tyr, Met, Ile, Arg, Ala, Glu, Asp, or Gln
  VAR_SEQ 11: note = Leu, Arg, Thr, Ile, Val, Ser, Cys, Tyr, Lys, Phe, or Gly
  VAR_SEQ 12: note = Lys, Gln, Tyr, Thr, Phe, Leu, Trp, Met, Ala, Glu, Gly, or Ser
  VAR_SEQ 16: note = Ile, Leu, Phe, Ser, Arg, Tyr, Gln, Trp, Asp, Lys, or His
  VAR_SEQ 17: note = Asp, Ser, Ile, Asn, Glu, Ala, His, Phe, Leu, Gln, Met, Gly, Tyr, or Val
  VAR_SEQ 22: note = Thr, Val, Cys, Glu, Ser, or Ala
  VAR_SEQ 23: note = Arg, Phe, Thr, Trp, Glu, Leu, Asn, Cys, Lys, Val, Ser, Gln, Ile, Tyr, His, or Ala
  VAR_SEQ 24: note = Ser, Pro, Arg, Lys, Asn, Ala, His, Gln, Gly, or Leu
  VAR_SEQ 25: note = Asp, Gly, Thr, Asn, Ser, Lys, Ala, Ile, Glu, Leu, Gln, Arg, or Tyr
  VAR_SEQ 26: note = Lys, Val, Ala, Glu, Tyr, Ile, Cys, Leu, Ser, Thr, Gly, Lys, Met, Asp, or Phe
XXXHXXPXSXXXDDSXXNKVLXXXXXN

SEQ ID NO: 19 - protein, 27 aa, synthetic construct
  VAR_SEQ 1..27: note = HNH-like domain
  VAR_SEQ 1: note = Asp or Glu
  VAR_SEQ 3: note = Asp or Glu
  VAR_SEQ 8: note = Gln, His, Arg, Lys, Tyr, Ile, Leu, or Trp
  VAR_SEQ 10: note = Phe, Leu, Val, Lys, Tyr, Met, Ile, Arg, Ala, Glu, Asp, or Gln
  VAR_SEQ 11: note = Leu, Arg, Thr, Ile, Val, Ser, Cys, Tyr, Lys, Phe, or Gly
  VAR_SEQ 12: note = Lys, Gln, Tyr, Thr, Phe, Leu, Trp, Met, Ala, Glu, Gly, or Ser
  VAR_SEQ 16: note = Ile, Leu, Phe, Ser, Arg, Tyr, Gln, Trp, Asp, Lys, or His
  VAR_SEQ 17: note = Asp, Ser, Ile, Asn, Glu, Ala, His, Phe, Leu, Gln, Met, Gly, Tyr, or Val
  VAR_SEQ 23: note = Arg, Phe, Thr, Trp, Glu, Leu, Asn, Cys, Lys, Val, Ser, Gln, Ile, Tyr, His, or Ala
  VAR_SEQ 24: note = Ser, Pro, Arg, Lys, Asn, Ala, His, Gln, Gly, or Leu
  VAR_SEQ 25: note = Asp, Gly, Thr, Asn, Ser, Lys, Ala, Ile, Glu, Leu, Gln, Arg, or Tyr
  VAR_SEQ 26: note = Lys, Val, Ala, Glu, Tyr, Ile, Cys, Leu, Ser, Thr, Gly, Lys, Met, Asp, or Phe
XVXHIVPXSXXXDDSXXNKVLTXXXXN

SEQ ID NO: 20 - protein, 27 aa, synthetic construct
  VAR_SEQ 1..27: note = HNH-like domain
  VAR_SEQ 2: note = Ile or Val
  VAR_SEQ 6: note = Ile or Val
  VAR_SEQ 9: note = Ala or Ser
  VAR_SEQ 11: note = Ile or Leu
  VAR_SEQ 12: note = Lys or Thr
  VAR_SEQ 14: note = Asp or Asn
  VAR_SEQ 19: note = Arg, Lys, or Leu
  VAR_SEQ 22: note = Thr or Val
  VAR_SEQ 23: note = Ser or Arg
  VAR_SEQ 25: note = Lys, Asp, or Ala
  VAR_SEQ 26: note = Glu, Lys, Gly, or Asn
DXDHIXPQXFXXDXSIDNXVLXXSXXN

SEQ ID NO: 21 - protein, 73 aa, synthetic construct
  VAR_SEQ 1..73: note = synthetic polypeptide
  VAR_SEQ 25..64: note = Any amino acid, and region may encompass 15-40 residues wherein some positions may be absent
  VAR_SEQ 8: note = Lys or Arg
  VAR_SEQ 12: note = Val or Thr
  VAR_SEQ 13: note = Gly or Asp
  VAR_SEQ 14: note = Glu, Gln, or Asp
  VAR_SEQ 15: note = Glu or Asp
  VAR_SEQ 19: note = Asp, Asn, or His
  VAR_SEQ 20: note = Tyr, Arg, or Asn
  VAR_SEQ 23: note = Gln, Asp, or Asn
  VAR_SEQ 67: note = Gly or Glu
  VAR_SEQ 69: note = Ser or Gly
  VAR_SEQ 71: note = Asp or Asn
LYYLQNGXDMYXXXXLDIXXLSXYXXXXXXXXXXXXXXXXXXXXXXXXXXXXXXXXXXXXXXXXNRXKXDXVP

SEQ ID NO: 22 - DNA, 4107 bp, synthetic construct
  misc_feature 1..4107: note = Codon optimized S. pyogenes Cas9
  source 1..4107: mol_type = other DNA
atggataaaaagtacagcatcgggctggacatcggtacaaactcagtggggtgggccgtgattacggacgagtacaaggtaccctccaaaaaatttaaagtgctgggtaacacggacagacactctataaagaaaaatcttattggagccttgctgttcgactcaggcgagacagccgaagccacaaggttgaagcggaccgccaggaggcggtataccaggagaaagaaccgcatatgctacctgcaagaaatcttcagtaacgagatggcaaaggttgacgatagctttttccatcgcctggaagaatcctttcttgttgaggaagacaagaagcacgaacggcaccccatctttggcaatattgtcgacgaagtggcatatcacgaaaagtacccgactatctaccacctcaggaagaagctggtggactctaccgataaggcggacctcagacttatttatttggcactcgcccacatgattaaatttagaggacatttcttgatcgagggcgacctgaacccggacaacagtgacgtcgataagctgttcatccaacttgtgcagacctacaatcaactgttcgaagaaaaccctataaatgcttcaggagtcgacgctaaagcaatcctgtccgcgcgcctctcaaaatctagaagacttgagaatctgattgctcagttgcccggggaaaagaaaaatggattgtttggcaacctgatcgccctcagtctcggactgaccccaaatttcaaaagtaacttcgacctggccgaagacgctaagctccagctgtccaaggacacatacgatgacgacctcgacaatctgctggcccagattggggatcagtacgccgatctctttttggcagcaaagaacctgtccgacgccatcctgttgagcgatatcttgagagtgaacaccgaaattactaaagcaccccttagcgcatctatgatcaagcggtacgacgagcatcatcaggatctgaccctgctgaaggctcttgtgaggcaacagctccccgaaaaatacaaggaaatcttctttgaccagagcaaaaacggctacgctggctatatagatggtggggccagtcaggaggaattctataaattcatcaagcccattctcgagaaaatggacggcacagaggagttgctggtcaaacttaacagggaggacctgctgcggaagcagcggacctttgacaacgggtctatcccccaccagattcatctgggcgaactgcacgcaatcctgaggaggcaggaggatttttatccttttcttaaagataaccgcgagaaaatagaaaagattcttacattcaggatcccgtactacgtgggacctctcgcccggggcaattcacggtttgcctggatgacaaggaagtcagaggagactattacaccttggaacttcgaagaagtggtggacaagggtgcatctgcccagtctttcatcgagcggatgacaaattttgacaagaacctccctaatgagaaggtgctgcccaaacattctctgctctacgagtactttaccgtctacaatgaactgactaaagtcaagtacgtcaccgagggaatgaggaagccggcattccttagtggagaacagaagaaggcgattgtagacctgttgttcaagaccaacaggaaggtgactgtgaagcaacttaaagaagactactttaagaagatcgaatgttttgacagtgtggaaatttcaggggttgaagaccgcttcaatgcgtcattggggacttaccatgatcttctcaagatcataaaggacaaagacttcctggacaacgaagaaaatgaggatattctcgaagacatcgtcctcaccctgaccctgttcgaagacagggaaatgatagaagagcgcttgaaaacctatgcccacctcttcgacgataaagttatgaagcagctgaagcgcaggagatacacaggatggggaagattgtcaaggaagctgatcaatggaattagggataaacagagtggcaagaccatactggatttcctcaaatctgatggcttcgccaataggaacttcatgcaactgattcacgatgactctcttaccttcaaggaggacattcaaaaggctcaggtgagcgggcagggagactcccttcatgaacacatcgcgaatttggcaggttcccccgctattaaaaagggcatccttcaaactgtcaaggtggtggatgaattggtcaaggtaatgggcagacataagccagaaaatattgtgatcgagatggcccgcgaaaaccagaccacacagaagggccagaaaaatagtagagagcggatgaagaggatcgaggagggcatcaaagagctgggatctcagattctcaaagaacaccccgtagaaaacacacagctgcagaacgaaaaattgtacttgtactatctgcagaacggcagagacatgtacgtcgaccaagaacttgatattaatagactgtccgactatgacgtagaccatatcgtgccccagtccttcctgaaggacgactccattgataacaaagtcttgacaagaagcgacaagaacaggggtaaaagtgataatgtgcctagcgaggaggtggtgaaaaaaatgaagaactactggcgacagctgcttaatgcaaagctcattacacaacggaagttcgataatctgacgaaagcagagagaggtggcttgtctgagttggacaaggcagggtttattaagcggcagctggtggaaactaggcagatcacaaagcacgtggcgcagattttggacagccggatgaacacaaaatacgacgaaaatgataaactgatacgagaggtcaaagttatcacgctgaaaagcaagctggtgtccgattttcggaaagacttccagttctacaaagttcgcgagattaataactaccatcatgctcacgatgcgtacctgaacgctgttgtcgggaccgccttgataaagaagtacccaaagctggaatccgagttcgtatacggggattacaaagtgtacgatgtgaggaaaatgatagccaagtccgagcaggagattggaaaggccacagctaagtacttcttttattctaacatcatgaatttttttaagacggaaattaccctggccaacggagagatcagaaagcggccccttatagagacaaatggtgaaacaggtgaaatcgtctgggataagggcagggatttcgctactgtgaggaaggtgctgagtatgccacaggtaaatatcgtgaaaaaaaccgaagtacagaccggaggattttccaaggaaagcattttgcctaaaagaaactcagacaagctcatcgcccgcaagaaagattgggaccctaagaaatacgggggatttgactcacccaccgtagcctattctgtgctggtggtagctaaggtggaaaaaggaaagtctaagaagctgaagtccgtgaaggaactcttgggaatcactatcatggaaagatcatcctttgaaaagaaccctatcgatttcctggaggctaagggttacaaggaggtcaagaaagacctcatcattaaactgccaaaatactctctcttcgagctggaaaatggcaggaagagaatgttggccagcgccggagagctgcaaaagggaaacgagcttgctctgccctccaaatatgttaattttctctatctcgcttcccactatgaaaagctgaaagggtctcccgaagataacgagcagaagcagctgttcgtcgaacagcacaagcactatctggatgaaataatcgaacaaataagcgagttcagcaaaagggttatcctggcggatgctaatttggacaaagtactgtctgcttataacaagcaccgggataagcctattagggaacaagccgagaatataattcacctctttacactcacgaatctcggagcccccgccgccttcaaatactttgatacgactatcgaccggaaacggtataccagtaccaaagaggtcctcgatgccaccctcatccaccagtcaattactggcctgtacgaaacacggatcgacctctctcaactgggcggcgactag

SEQ ID NO: 23 - skipped

SEQ ID NO: 24 - DNA, 3249 bp, synthetic construct
  misc_feature 1..3249: note = Codon optimized N. meningitidis Cas9
  source 1..3249: mol_type = other DNA
atggccgccttcaagcccaaccccatcaactacatcctgggcctggacatcggcatcgccagcgtgggctgggccatggtggagatcgacgaggacgagaaccccatctgcctgatcgacctgggtgtgcgcgtgttcgagcgcgctgaggtgcccaagactggtgacagtctggctatggctcgccggcttgctcgctctgttcggcgccttactcgccggcgcgctcaccgccttctgcgcgctcgccgcctgctgaagcgcgagggtgtgctgcaggctgccgacttcgacgagaacggcctgatcaagagcctgcccaacactccttggcagctgcgcgctgccgctctggaccgcaagctgactcctctggagtggagcgccgtgctgctgcacctgatcaagcaccgcggctacctgagccagcgcaagaacgagggcgagaccgccgacaaggagctgggtgctctgctgaagggcgtggccgacaacgcccacgccctgcagactggtgacttccgcactcctgctgagctggccctgaacaagttcgagaaggagagcggccacatccgcaaccagcgcggcgactacagccacaccttcagccgcaaggacctgcaggccgagctgatcctgctgttcgagaagcagaaggagttcggcaacccccacgtgagcggcggcctgaaggagggcatcgagaccctgctgatgacccagcgccccgccctgagcggcgacgccgtgcagaagatgctgggccactgcaccttcgagccagccgagcccaaggccgccaagaacacctacaccgccgagcgcttcatctggctgaccaagctgaacaacctgcgcatcctggagcagggcagcgagcgccccctgaccgacaccgagcgcgccaccctgatggacgagccctaccgcaagagcaagctgacctacgcccaggcccgcaagctgctgggtctggaggacaccgccttcttcaagggcctgcgctacggcaaggacaacgccgaggccagcaccctgatggagatgaaggcctaccacgccatcagccgcgccctggagaaggagggcctgaaggacaagaagagtcctctgaacctgagccccgagctgcaggacgagatcggcaccgccttcagcctgttcaagaccgacgaggacatcaccggccgcctgaaggaccgcatccagcccgagatcctggaggccctgctgaagcacatcagcttcgacaagttcgtgcagatcagcctgaaggccctgcgccgcatcgtgcccctgatggagcagggcaagcgctacgacgaggcctgcgccgagatctacggcgaccactacggcaagaagaacaccgaggagaagatctacctgcctcctatccccgccgacgagatccgcaaccccgtggtgctgcgcgccctgagccaggcccgcaaggtgatcaacggcgtggtgcgccgctacggcagccccgcccgcatccacatcgagaccgcccgcgaggtgggcaagagcttcaaggaccgcaaggagatcgagaagcgccaggaggagaaccgcaaggaccgcgagaaggccgccgccaagttccgcgagtacttccccaacttcgtgggcgagcccaagagcaaggacatcctgaagctgcgcctgtacgagcagcagcacggcaagtgcctgtacagcggcaaggagatcaacctgggccgcctgaacgagaagggctacgtggagatcgaccacgccctgcccttcagccgcacctgggacgacagcttcaacaacaaggtgctggtgctgggcagcgagaaccagaacaagggcaaccagaccccctacgagtacttcaacggcaaggacaacagccgcgagtggcaggagttcaaggcccgcgtggagaccagccgcttcccccgcagcaagaagcagcgcatcctgctgcagaagttcgacgaggacggcttcaaggagcgcaacctgaacgacacccgctacgtgaaccgcttcctgtgccagttcgtggccgaccgcatgcgcctgaccggcaagggcaagaagcgcgtgttcgccagcaacggccagatcaccaacctgctgcgcggcttctggggcctgcgcaaggtgcgcgccgagaacgaccgccaccacgccctggacgccgtggtggtggcctgcagcaccgtggccatgcagcagaagatcacccgcttcgtgcgctacaaggagatgaacgccttcgacggtaaaaccatcgacaaggagaccggcgaggtgctgcaccagaagacccacttcccccagccctgggagttcttcgcccaggaggtgatgatccgcgtgttcggcaagcccgacggcaagcccgagttcgaggaggccgacacccccgagaagctgcgcaccctgctggccgagaagctgagcagccgccctgaggccgtgcacgagtacgtgactcctctgttcgtgagccgcgcccccaaccgcaagatgagcggtcagggtcacatggagaccgtgaagagcgccaagcgcctggacgagggcgtgagcgtgctgcgcgtgcccctgacccagctgaagctgaaggacctggagaagatggtgaaccgcgagcgcgagcccaagctgtacgaggccctgaaggcccgcctggaggcccacaaggacgaccccgccaaggccttcgccgagcccttctacaagtacgacaaggccggcaaccgcacccagcaggtgaaggccgtgcgcgtggagcaggtgcagaagaccggcgtgtgggtgcgcaaccacaacggcatcgccgacaacgccaccatggtgcgcgtggacgtgttcgagaagggcgacaagtactacctggtgcccatctacagctggcaggtggccaagggcatcctgcccgaccgcgccgtggtgcagggcaaggacgaggaggactggcagctgatcgacgacagcttcaacttcaagttcagcctgcaccccaacgacctggtggaggtgatcaccaagaaggcccgcatgttcggctacttcgccagctgccaccgcggcaccggcaacatcaacatccgcatccacgacctggaccacaagatcggcaagaacggcatcctggagggcatcggcgtgaagaccgccctgagcttccagaagtaccagatcgacgagctgggcaaggagatccgcccctgccgcctgaagaagcgccctcctgtgcgctaa

SEQ ID NO: 25 - protein, 1082 aa, Neisseria meningitidis
MAAFKPNPINYILGLDIGIASVGWAMVEIDEDENPICLIDLGVRVFERAEVPKTGDSLAMARRLARSVRRLTRRRAHRLLRARRLLKREGVLQAADFDENGLIKSLPNTPWQLRAAALDRKLTPLEWSAVLLHLIKHRGYLSQRKNEGETADKELGALLKGVADNAHALQTGDFRTPAELALNKFEKESGHIRNQRGDYSHTFSRKDLQAELILLFEKQKEFGNPHVSGGLKEGIETLLMTQRPALSGDAVQKMLGHCTFEPAEPKAAKNTYTAERFIWLTKLNNLRILEQGSERPLTDTERATLMDEPYRKSKLTYAQARKLLGLEDTAFFKGLRYGKDNAEASTLMEMKAYHAISRALEKEGLKDKKSPLNLSPELQDEIGTAFSLFKTDEDITGRLKDRIQPEILEALLKHISFDKFVQISLKALRRIVPLMEQGKRYDEACAEIYGDHYGKKNTEEKIYLPPIPADEIRNPVVLRALSQARKVINGVVRRYGSPARIHIETAREVGKSFKDRKEIEKRQEENRKDREKAAAKFREYFPNFVGEPKSKDILKLRLYEQQHGKCLYSGKEINLGRLNEKGYVEIDHALPFSRTWDDSFNNKVLVLGSENQNKGNQTPYEYFNGKDNSREWQEFKARVETSRFPRSKKQRILLQKFDEDGFKERNLNDTRYVNRFLCQFVADRMRLTGKGKKRVFASNGQITNLLRGFWGLRKVRAENDRHHALDAVVVACSTVAMQQKITRFVRYKEMNAFDGKTIDKETGEVLHQKTHFPQPWEFFAQEVMIRVFGKPDGKPEFEEADTPEKLRTLLAEKLSSRPEAVHEYVTPLFVSRAPNRKMSGQGHMETVKSAKRLDEGVSVLRVPLTQLKLKDLEKMVNREREPKLYEALKARLEAHKDDPAKAFAEPFYKYDKAGNRTQQVKAVRVEQVQKTGVWVRNHNGIADNATMVRVDVFEKGDKYYLVPIYSWQVAKGILPDRAVVQGKDEEDWQLIDDSFNFKFSLHPNDLVEVITKKARMFGYFASCHRGTGNINIRIHDLDHKIGKNGILEGIGVKTALSFQKYQIDELGKEIRPCRLKKRPPVR

SEQ ID NO: 26 - protein, 1053 aa, Staphylococcus aureus
MKRNYILGLDIGITSVGYGIIDYETRDVIDAGVRLFKEANVENNEGRRSKRGARRLKRRRRHRIQRVKKLLFDYNLLTDHSELSGINPYEARVKGLSQKLSEEEFSAALLHLAKRRGVHNVNEVEEDTGNELSTKEQISRNSKALEEKYVAELQLERLKKDGEVRGSINRFKTSDYVKEAKQLLKVQKAYHQLDQSFIDTYIDLLETRRTYYEGPGEGSPFGWKDIKEWYEMLMGHCTYFPEELRSVKYAYNADLYNALNDLNNLVITRDENEKLEYYEKFQIIENVFKQKKKPTLKQIAKEILVNEEDIKGYRVTSTGKPEFTNLKVYHDIKDITARKEIIENAELLDQIAKILTIYQSSEDIQEELTNLNSELTQEEIEQISNLKGYTGTHNLSLKAINLILDELWHTNDNQIAIFNRLKLVPKKVDLSQQKEIPTTLVDDFILSPVVKRSFIQSIKVINAIIKKYGLPNDIIIELAREKNSKDAQKMINEMQKRNRQTNERIEEIIRTTGKENAKYLIEKIKLHDMQEGKCLYSLEAIPLEDLLNNPFNYEVDHIIPRSVSFDNSFNNKVLVKQEENSKKGNRTPFQYLSSSDSKISYETFKKHILNLAKGKGRISKTKKEYLLEERDINRFSVQKDFINRNLVDTRYATRGLMNLLRSYFRVNNLDVKVKSINGGFTSFLRRKWKFKKERNKGYKHHAEDALIIANADFIFKEWKKLDKAKKVMENQMFEEKQAESMPEIETEQEYKEIFITPHQIKHIKDFKDYKYSHRVDKKPNRELINDTLYSTRKDDKGNTLIVNNLNGLYDKDNDKLKKLINKSPEKLLMYHHDPQTYQKLKLIMEQYGDEKNPLYKYYEETGNYLTKYSKKDNGPVIKKIKYYGNKLNAHLDITDDYPNSRNKVVKLSLKPYRFDVYLDNGVYKFVTVKNLDVIKKENYYEVNSKCYEEAKKLKKISNQAEFIASFYNNDLIKINGELYRVIGVNNDLLNRIEVNMIDITYREYLENMNDKRPPRIIKTIASKTQSIKKYSTDILGNLYEVKSKKHPQIIKKG

SEQ ID NO: 27 - RNA, 104 nt, synthetic construct
  misc_feature 1..104: note = gRNA
  misc_difference 1..20: note = Targeting domain, each n is a, c, u, g, unknown, or other
  source 1..104: mol_type = other RNA
nnnnnnnnnnnnnnnnnnnngttttagagctatgctgaaaagcatagcaagttaaaataaggctagtccgttatcaacttgaaaaagtggcaccgagtcggtgc

SEQ ID NO: 28 - RNA, 106 nt, synthetic construct
  misc_feature 1..106: note = gRNA
  misc_difference 1..20: note = Targeting domain, each n is a, c, u, g, unknown, or other
  source 1..106: mol_type = other RNA
nnnnnnnnnnnnnnnnnnnngttttagagctatgctggaaacagcatagcaagttaaaataaggctagtccgttatcaacttgaaaaagtggcaccgagtcggtgc

SEQ ID NO: 29 - RNA, 116 nt, synthetic construct
  misc_feature 1..116: note = gRNA
  misc_difference 1..20: note = Targeting domain, each n is a, c, u, g, unknown, or other
  source 1..116: mol_type = other RNA
nnnnnnnnnnnnnnnnnnnngttttagagctatgctgttttggaaacaaaacagcatagcaagttaaaataaggctagtccgttatcaacttgaaaaagtggcaccgagtcggtgc

SEQ ID NO: 30 - RNA, 96 nt, synthetic construct
  misc_feature 1..96: note = gRNA
  misc_difference 1..20: note = Targeting domain, each n is a, c, u, g, unknown, or other
  source 1..96: mol_type = other RNA
nnnnnnnnnnnnnnnnnnnngtattagagctagaaatagcaagttaatataaggctagtccgttatcaacttgaaaaagtggcaccgagtcggtgc

SEQ ID NO: 31 - RNA, 96 nt, synthetic construct
  misc_difference 1..96: note = gRNA
  misc_difference 1..20: note = Targeting domain, each n is a, c, u, g, unknown, or other
  source 1..96: mol_type = other RNA
nnnnnnnnnnnnnnnnnnnngtttaagagctagaaatagcaagtttaaataaggctagtccgttatcaacttgaaaaagtggcaccgagtcggtgc

SEQ ID NO: 32 - RNA, 116 nt, synthetic construct
  misc_difference 1..116: note = gRNA
  misc_difference 1..20: note = Targeting domain, each n is a, c, u, g, unknown, or other
  source 1..116: mol_type = other RNA
nnnnnnnnnnnnnnnnnnnngtattagagctatgctgtattggaaacaatacagcatagcaagttaatataaggctagtccgttatcaacttgaaaaagtggcaccgagtcggtgc

SEQ ID NO: 33 - RNA, 47 nt, synthetic construct
  misc_feature 1..47: note = Proximal and tail domains
  source 1..47: mol_type = other RNA
aaggctagtccgttatcaacttgaaaaagtggcaccgagtcggtgct

SEQ ID NO: 34 - RNA, 49 nt, synthetic construct
  misc_feature 1..49: note = Proximal and tail domains
  source 1..49: mol_type = other RNA
aaggctagtccgttatcaacttgaaaaagtggcaccgagtcggtggtgc

SEQ ID NO: 35 - RNA, 51 nt, synthetic construct
  misc_feature 1..51: note = Proximal and tail domains
  source 1..51: mol_type = other RNA
aaggctagtccgttatcaacttgaaaaagtggcaccgagtcggtgcggatc

SEQ ID NO: 36 - RNA, 31 nt, synthetic construct
  misc_feature 1..31: note = Proximal and tail domains
  source 1..31: mol_type = other RNA
aaggctagtccgttatcaacttgaaaaagtg

SEQ ID NO: 37 - RNA, 18 nt, synthetic construct
  misc_feature 1..18: note = Proximal and tail domains
  source 1..18: mol_type = other RNA
aaggctagtccgttatca

SEQ ID NO: 38 - RNA, 12 nt, synthetic construct
  misc_feature 1..12: note = Proximal and tail domains
  source 1..12: mol_type = other RNA
aaggctagtccg

SEQ ID NO: 39 - DNA, 3159 bp, synthetic construct
  misc_feature 1..3159: note = Codon optimized S. aureus Cas9
  source 1..3159: mol_type = other DNA
atgaaaaggaactacattctggggctggacatcgggattacaagcgtggggtatgggattattgactatgaaacaagggacgtgatcgacgcaggcgtcagactgttcaaggaggccaacgtggaaaacaatgagggacggagaagcaagaggggagccaggcgcctgaaacgacggagaaggcacagaatccagagggtgaagaaactgctgttcgattacaacctgctgaccgaccattctgagctgagtggaattaatccttatgaagccagggtgaaaggcctgagtcagaagctgtcagaggaagagttttccgcagctctgctgcacctggctaagcgccgaggagtgcataacgtcaatgaggtggaagaggacaccggcaacgagctgtctacaaaggaacagatctcacgcaatagcaaagctctggaagagaagtatgtcgcagagctgcagctggaacggctgaagaaagatggcgaggtgagagggtcaattaataggttcaagacaagcgactacgtcaaagaagccaagcagctgctgaaagtgcagaaggcttaccaccagctggatcagagcttcatcgatacttatatcgacctgctggagactcggagaacctactatgagggaccaggagaagggagccccttcggatggaaagacatcaaggaatggtacgagatgctgatgggacattgcacctattttccagaagagctgagaagcgtcaagtacgcttataacgcagatctgtacaacgccctgaatgacctgaacaacctggtcatcaccagggatgaaaacgagaaactggaatactatgagaagttccagatcatcgaaaacgtgtttaagcagaagaaaaagcctacactgaaacagattgctaaggagatcctggtcaacgaagaggacatcaagggctaccgggtgacaagcactggaaaaccagagttcaccaatctgaaagtgtatcacgatattaaggacatcacagcacggaaagaaatcattgagaacgccgaactgctggatcagattgctaagatcctgactatctaccagagctccgaggacatccaggaagagctgactaacctgaacagcgagctgacccaggaagagatcgaacagattagtaatctgaaggggtacaccggaacacacaacctgtccctgaaagctatcaatctgattctggatgagctgtggcatacaaacgacaatcagattgcaatctttaaccggctgaagctggtcccaaaaaaggtggacctgagtcagcagaaagagatcccaaccacactggtggacgatttcattctgtcacccgtggtcaagcggagcttcatccagagcatcaaagtgatcaacgccatcatcaagaagtacggcctgcccaatgatatcattatcgagctggctagggagaagaacagcaaggacgcacagaagatgatcaatgagatgcagaaacgaaaccggcagaccaatgaacgcattgaagagattatccgaactaccgggaaagagaacgcaaagtacctgattgaaaaaatcaagctgcacgatatgcaggagggaaagtgtctgtattctctggaggccatccccctggaggacctgctgaacaatccattcaactacgaggtcgatcatattatccccagaagcgtgtccttcgacaattcctttaacaacaaggtgctggtcaagcaggaagagaactctaaaaagggcaataggactcctttccagtacctgtctagttcagattccaagatctcttacgaaacctttaaaaagcacattctgaatctggccaaaggaaagggccgcatcagcaagaccaaaaaggagtacctgctggaagagcgggacatcaacagattctccgtccagaaggattttattaaccggaatctggtggacacaagatacgctactcgcggcctgatgaatctgctgcgatcctatttccgggtgaacaatctggatgtgaaagtcaagtccatcaacggcgggttcacatcttttctgaggcgcaaatggaagtttaaaaaggagcgcaacaaagggtacaagcaccatgccgaagatgctctgattatcgcaaatgccgacttcatctttaaggagtggaaaaagctggacaaagccaagaaagtgatggagaaccagatgttcgaagagaagcaggccgaatctatgcccgaaatcgagacagaacaggagtacaaggagattttcatcactcctcaccagatcaagcatatcaaggatttcaaggactacaagtactctcaccgggtggataaaaagcccaacagagagctgatcaatgacaccctgtatagtacaagaaaagacgataaggggaataccctgattgtgaacaatctgaacggactgtacgacaaagataatgacaagctgaaaaagctgatcaacaaaagtcccgagaagctgctgatgtaccaccatgatcctcagacatatcagaaactgaagctgattatggagcagtacggcgacgagaagaacccactgtataagtactatgaagagactgggaactacctgaccaagtatagcaaaaaggataatggccccgtgatcaagaagatcaagtactatgggaacaagctgaatgcccatctggacatcacagacgattaccctaacagtcgcaacaaggtggtcaagctgtcactgaagccatacagattcgatgtctatctggacaacggcgtgtataaatttgtgactgtcaagaatctggatgtcatcaaaaaggagaactactatgaagtgaatagcaagtgctacgaagaggctaaaaagctgaaaaagattagcaaccaggcagagttcatcgcctccttttacaacaacgacctgattaagatcaatggcgaactgtatagggtcatcggggtgaacaatgatctgctgaaccgcattgaagtgaatatgattgacatcacttaccgagagtatctggaaaacatgaatgataagcgcccccctcgaattatcaaaacaattgcctctaagactcagagtatcaaaaagtactcaaccgacattctgggaaacctgtatgaggtgaagagcaaaaagcaccctcagattatcaaaaagggc

SEQ ID NO: 40-41 - skipped (2 entries)

SEQ ID NO: 42 - RNA, 42 nt, synthetic construct
  misc_difference 1..42: note = S. pyogenes gRNA, targeting and first complementarity domains
  misc_difference 1..20: note = Targeting domain, each n is a, c, u, g, unknown, or other
  misc_feature 21..42: note = First complementarity domain
  source 1..42: mol_type = other RNA
nnnnnnnnnnnnnnnnnnnngttttagagctatgctgttttg

SEQ ID NO: 43 - RNA, 85 nt, synthetic construct
  misc_difference 1..85: note = S. pyogenes gRNA, 5' extension, 2nd complementarity, proximal, and tail domains
  misc_feature 1..9: note = 5' extension domain
  misc_feature 10..33: note = Second complementarity domain
  misc_feature 34..45: note = Proximal domain
  misc_feature 46..85: note = Tail domain
  source 1..85: mol_type = other RNA
ggaaccattcaaaacagcatagcaagttaaaataaggctagtccgttatcaacttgaaaaagtggcaccgagtcggtgctttttt

SEQ ID NO: 44 - RNA, 62 nt, synthetic construct
  misc_difference 1..62: note = S. pyogenes gRNA
  misc_difference 1..20: note = Targeting domain, each n is a, c, u, g, unknown, or other
  misc_feature 21..32: note = First complementarity domain
  misc_feature 33..36: note = Linking domain
  misc_feature 37..50: note = Second complementarity domain
  misc_feature 51..62: note = Proximal domain
  source 1..62: mol_type = other RNA
nnnnnnnnnnnnnnnnnnnngttttagagctagaaatagcaagttaaaataaggctagtccg

SEQ ID NO: 45 - RNA, 102 nt, synthetic construct
  misc_difference 1..102: note = S. pyogenes gRNA
  misc_difference 1..20: note = Targeting domain, each n is a, c, u, g, unknown, or other
  misc_feature 21..32: note = First complementarity domain
  misc_feature 33..36: note = Linking domain
  misc_feature 37..50: note = Second complementarity domain
  misc_feature 51..62: note = Proximal domain
  misc_feature 63..102: note = Tail domain
  source 1..102: mol_type = other RNA
nnnnnnnnnnnnnnnnnnnngttttagagctagaaatagcaagttaaaataaggctagtccgttatcaacttgaaaaagtggcaccgagtcggtgctttttt

SEQ ID NO: 46 - RNA, 75 nt, synthetic construct
  misc_difference 1..75: note = S. pyogenes gRNA
  misc_difference 1..20: note = Targeting domain, each n is a, c, u, g, unknown, or other
  misc_feature 21..36: note = First complementarity domain
  misc_feature 37..40: note = Linking domain
  misc_feature 41..58: note = Second complementarity domain
  misc_feature 59..70: note = Proximal domain
  misc_feature 71..75: note = Tail domain
  source 1..75: mol_type = other RNA
nnnnnnnnnnnnnnnnnnnngttttagagctatgctgaaaagcatagcaagttaaaataaggctagtccgttatc

SEQ ID NO: 47 - RNA, 87 nt, synthetic construct
  misc_difference 1..87: note = S. pyogenes gRNA
  misc_difference 1..20: note = Targeting domain, each n is a, c, u, g, unknown, or other
  misc_feature 21..32: note = First complementarity domain
  misc_feature 57..70: note = Second complementarity domain
  misc_feature 71..82: note = Proximal domain
  misc_feature 83..87: note = Tail domain
  source 1..87: mol_type = other RNA
nnnnnnnnnnnnnnnnnnnngttttagagctatgctgttttggaaacaaaacagcatagcaagttaaaataaggctagtccgttatc

SEQ ID NO: 48 - RNA, 42 nt, synthetic construct
  misc_difference 1..42: note = S. thermophilus gRNA, targeting and first complementarity domains
  misc_difference 1..20: note = Targeting domain, each n is a, c, u, g, unknown, or other
  misc_feature 21..42: note = First complementarity domain
  source 1..42: mol_type = other RNA
nnnnnnnnnnnnnnnnnnnngttttagagctgtgttgtttcg

SEQ ID NO: 49 - RNA, 78 nt, synthetic construct
  misc_difference 1..78: note = S. thermophilus gRNA, 5' extension, second complementarity, proximal, and tail domains
  misc_feature 1..3: note = 5' extension domain
  misc_feature 4..27: note = Second complementarity domain
  misc_feature 28..40: note = Proximal domain
  misc_feature 41..78: note = Tail domain
  source 1..78: mol_type = other RNA
gggcgaaacaacacagcgagttaaaataaggcttagtccgtactcaacttgaaaaggtggcaccgattcggtgttttt

SEQ ID NO: 50-51 - skipped (2 entries)

SEQ ID NO: 52 - RNA, 85 nt, Streptococcus pyogenes
  source 1..85: mol_type = other RNA
gaaccattcaaaacagcatagcaagttaaaataaggctagtccgttatcaacttgaaaaagtggcaccgagtcggtgcttttttt

SEQ ID NO: 53 - skipped

SEQ ID NO: 54 - protein, 12 aa, synthetic construct
  VAR_SEQ 1..12: note = N terminal RuvC-like domain
DIGTNSVGWAVT

SEQ ID NO: 55 - skipped

SEQ ID NO: 56 - protein, 12 aa, synthetic construct
  VAR_SEQ 1..12: note = N terminal RuvC-like domain
DVGTNSVGWAVT

SEQ ID NO: 57 - skipped

SEQ ID NO: 58 - protein, 12 aa, synthetic construct
  VAR_SEQ 1..12: note = N terminal RuvC-like domain
DMGTNSVGWAVT

SEQ ID NO: 59 - protein, 12 aa, synthetic construct
  VAR_SEQ 1..12: note = N terminal RuvC-like domain
DVGTSSVGWAVT

SEQ ID NO: 60 - protein, 12 aa, synthetic construct
  VAR_SEQ 1..12: note = N terminal RuvC-like domain
DIGTASVGWAVT

SEQ ID NO: 61 - protein, 12 aa, synthetic construct
  VAR_SEQ 1..12: note = N terminal RuvC-like domain
DVGTGSVGWAVT

SEQ ID NO: 62 - protein, 12 aa, synthetic construct
  VAR_SEQ 1..12: note = N terminal RuvC-like domain
DIGTNSVGWAVV

SEQ ID NO: 63 - protein, 12 aa, synthetic construct
  VAR_SEQ 1..12: note = N terminal RuvC-like domain
DIGTNSVGWAVI

SEQ ID NO: 64 - protein, 12 aa, synthetic construct
  VAR_SEQ 1..12: note = N terminal RuvC-like domain
DIGTNSVGWAVL

SEQ ID NO: 65 - protein, 12 aa, synthetic construct
  VAR_SEQ 1..12: note = N terminal RuvC-like domain
DLGTNSIGWAVV

SEQ ID NO: 66 - protein, 11 aa, synthetic construct
  VAR_SEQ 1..11: note = N terminal RuvC-like domain
DLGTNSIGWAI

SEQ ID NO: 67 - protein, 12 aa, synthetic construct
  VAR_SEQ 1..12: note = N terminal RuvC-like domain
DLGTNSIGWALV

SEQ ID NO: 68 - protein, 12 aa, synthetic construct
  VAR_SEQ 1..12: note = N terminal RuvC-like domain
DIGTNSVGWCVT

SEQ ID NO: 69 - protein, 12 aa, synthetic construct
  VAR_SEQ 1..12: note = N terminal RuvC-like domain
DIGTNSVGYAVT

SEQ ID NO: 70 - protein, 12 aa, synthetic construct
  VAR_SEQ 1..12: note = N terminal RuvC-like domain
DMGTGSLGWAVT

SEQ ID NO: 71 - protein, 12 aa, synthetic construct
  VAR_SEQ 1..12: note = N terminal RuvC-like domain
DIGTSSVGWAAI

SEQ ID NO: 72 - protein, 12 aa, synthetic construct
  VAR_SEQ 1..12: note = N terminal RuvC-like domain
DLGTGSVGWAVV

SEQ ID NO: 73 - protein, 12 aa, synthetic construct
  VAR_SEQ 1..12: note = N terminal RuvC-like domain
DLGVGSVGWAIV

SEQ ID NO: 74 - protein, 12 aa, synthetic construct
  VAR_SEQ 1..12: note = N terminal RuvC-like domain
DLGIASIGWAII

SEQ ID NO: 75 - protein, 12 aa, synthetic construct
  VAR_SEQ 1..12: note = N terminal RuvC-like domain
DLGIASVGWAIV

SEQ ID NO: 76 - protein, 12 aa, synthetic construct
  VAR_SEQ 1..12: note = N terminal RuvC-like domain
DLGVASVGWSIV

SEQ ID NO: 77 - protein, 12 aa, synthetic construct
  VAR_SEQ 1..12: note = N terminal RuvC-like domain
DIGIASVGWAIL

SEQ ID NO: 78 - protein, 12 aa, synthetic construct
  VAR_SEQ 1..12: note = N terminal RuvC-like domain
DLGISSVGWSVI

SEQ ID NO: 79 - protein, 12 aa, synthetic construct
  VAR_SEQ 1..12: note = N terminal RuvC-like domain
DIGIASVGWSVI

SEQ ID NO: 80 - protein, 12 aa, synthetic construct
  VAR_SEQ 1..12: note = N terminal RuvC-like domain
DVGIGSIGWAVI

SEQ ID NO: 81 - protein, 12 aa, synthetic construct
  VAR_SEQ 1..12: note = N terminal RuvC-like domain
DLGVGSIGFAIV

SEQ ID NO: 82 - protein, 12 aa, synthetic construct
  VAR_SEQ 1..12: note = N terminal RuvC-like domain
DIGYASIGWAVI

SEQ ID NO: 83 - protein, 12 aa, synthetic construct
  VAR_SEQ 1..12: note = N terminal RuvC-like domain
DTGTNSLGWAIV

SEQ ID NO: 84 - protein, 12 aa, synthetic construct
  VAR_SEQ 1..12: note = N terminal RuvC-like domain
DLGTNSIGWCLL

SEQ ID NO: 85 - protein, 12 aa, synthetic construct
  VAR_SEQ 1..12: note = N terminal RuvC-like domain
DIGTDSLGWAVF

SEQ ID NO: 86 - protein, 12 aa, synthetic construct
  VAR_SEQ 1..12: note = N terminal RuvC-like domain
DIGSNSIGFAVV

SEQ ID NO: 87 - protein, 12 aa, synthetic construct
  VAR_SEQ 1..12: note = N terminal RuvC-like domain
DLGVGSIGVAVA

SEQ ID NO: 88 - protein, 12 aa, synthetic construct
  VAR_SEQ 1..12: note = N terminal RuvC-like domain
DLGIASCGWGVV

SEQ ID NO: 89 - protein, 12 aa, synthetic construct
  VAR_SEQ 1..12: note = N terminal RuvC-like domain
DLGIASVGWCLT

SEQ ID NO: 90 - protein, 12 aa, synthetic construct
  VAR_SEQ 1..12: note = N terminal RuvC-like domain
DIGIGSVGVGIL

SEQ ID NO: 91 - protein, 12 aa, synthetic construct
  VAR_SEQ 1..12: note = N terminal RuvC-like domain
DIGITSVGYGLI

SEQ ID NO: 92 - protein, 12 aa, synthetic construct
  VAR_SEQ 1..12: note = N terminal RuvC-like domain
DIGITSVGFGII

SEQ ID NO: 93 - protein, 12 aa, synthetic construct
  VAR_SEQ 1..12: note = N terminal RuvC-like domain
DVGITSTGYAVL

SEQ ID NO: 94 - protein, 12 aa, synthetic construct
  VAR_SEQ 1..12: note = N terminal RuvC-like domain
DLGITSFGYAIL

SEQ ID NO: 95 - protein, 12 aa, synthetic construct
  VAR_SEQ 1..12: note = N terminal RuvC-like domain
DIGNASVGWSAF

SEQ ID NO: 96 - protein, 12 aa, synthetic construct
  VAR_SEQ 1..12: note = N terminal RuvC-like domain
DVGTNSCGWVAM

SEQ ID NO: 97 - protein, 12 aa, synthetic construct
  VAR_SEQ 1..12: note = N terminal RuvC-like domain
DVGERSIGLAAV

SEQ ID NO: 98 - protein, 12 aa, synthetic construct
  VAR_SEQ 1..12: note = N terminal RuvC-like domain
DVGLNSVGLAAV

SEQ ID NO: 99 - protein, 12 aa, synthetic construct
  VAR_SEQ 1..12: note = N terminal RuvC-like domain
DVGLMSVGLAAI

SEQ ID NO: 100 - protein, 12 aa, synthetic construct
  VAR_SEQ 1..12: note = N terminal RuvC-like domain
DVGTFSVGLAAI

SEQ ID NO: 101 - protein, 12 aa, synthetic construct
  VAR_SEQ 1..12: note = N terminal RuvC-like domain
DIGTGSVGYACM

SEQ ID NO: 102 - protein, 12 aa, synthetic construct
  VAR_SEQ 1..12: note = N terminal RuvC-like domain
DLGTTSIGFAHI

SEQ ID NO: 103 - protein, 12 aa, synthetic construct
  VAR_SEQ 1..12: note = N terminal RuvC-like domain
DLGTNSIGSSVR

SEQ ID NO: 104-113 - skipped (10 entries)

SEQ ID NO: 114 - protein, 12 aa, synthetic construct
  VAR_SEQ 1..12: note = N terminal RuvC-like domain
DIGTNSIGWAVI

SEQ ID NO: 115-126 - skipped (12 entries)

SEQ ID NO: 127 - protein, 12 aa, synthetic construct
  VAR_SEQ 1..12: note = N terminal RuvC-like domain
DLGIASVGWAVV

SEQ ID NO: 128-129 - skipped (2 entries)

SEQ ID NO: 130 - protein, 12 aa, synthetic construct
  VAR_SEQ 1..12: note = N terminal RuvC-like domain
DIGIASVGWAVL

SEQ ID NO: 131 - protein, 12 aa, synthetic construct
  VAR_SEQ 1..12: note = N terminal RuvC-like domain
DIGIASIGWAVI

SEQ ID NO: 132 - protein, 12 aa, synthetic construct
  VAR_SEQ 1..12: note = N terminal RuvC-like domain
DIGIASVGWAII

SEQ ID NO: 133 - protein, 12 aa, synthetic construct
  VAR_SEQ 1..12: note = N terminal RuvC-like domain
DVGIASVGWAVI

SEQ ID NO: 134 - protein, 11 aa, synthetic construct
  VAR_SEQ 1..11: note = N terminal RuvC-like domain
DIGIASVGWAL

SEQ ID NO: 135 - protein, 12 aa, synthetic construct
  VAR_SEQ 1..12: note = N terminal RuvC-like domain
DIGIASVGWAMV

SEQ ID NO: 136-137 - skipped (2 entries)

SEQ ID NO: 138 - protein, 12 aa, synthetic construct
  VAR_SEQ 1..12: note = N terminal RuvC-like domain
DIGITSVGWAVI

SEQ ID NO: 139 - skipped

SEQ ID NO: 140 - protein, 12 aa, synthetic construct
  VAR_SEQ 1..12: note = N terminal RuvC-like domain
DLGISSLGWAIV

SEQ ID NO: 141-143 - skipped (3 entries)

SEQ ID NO: 144 - protein, 12 aa, synthetic construct
  VAR_SEQ 1..12: note = N terminal RuvC-like domain
DLGTNSIGWGLL

SEQ ID NO: 145-146 - skipped (2 entries)

SEQ ID NO: 147 - protein, 12 aa, synthetic construct
  VAR_SEQ 1..12: note = N terminal RuvC-like domain
DLGSTSLGWAIF

SEQ ID NO: 148 - protein, 12 aa, synthetic construct
  VAR_SEQ 1..12: note = N terminal RuvC-like domain
DIGISSIGWAFS

SEQ ID NO: 149-151 - skipped (3 entries)

SEQ ID NO: 152 - protein, 12 aa, synthetic construct
  VAR_SEQ 1..12: note = N terminal RuvC-like domain
DIGTTSIGFSVI

SEQ ID NO: 153-159 - skipped (7 entries)

SEQ ID NO: 160 - protein, 12 aa, synthetic construct
  VAR_SEQ 1..12: note = N terminal RuvC-like domain
DIGTSSIGWWLY

SEQ ID NO: 161 - protein, 12 aa, synthetic construct
  VAR_SEQ 1..12: note = N terminal RuvC-like domain
DLGSNSLGWFVT

SEQ ID NO: 162 - protein, 12 aa, synthetic construct
  VAR_SEQ 1..12: note = N terminal RuvC-like domain
DLGANSLGWFVV

SEQ ID NO: 163-170 - skipped (8 entries)

SEQ ID NO: 171 - protein, 15 aa, synthetic construct
  VAR_SEQ 1..15: note = N terminal RuvC-like domain
DIGLRIGITSCGWSI

SEQ ID NO: 172 - protein, 12 aa, synthetic construct
  VAR_SEQ 1..12: note = N terminal RuvC-like domain
DMGAKYTGVFYA

SEQ ID NO: 173 - protein, 12 aa, synthetic construct
  VAR_SEQ 1..12: note = N terminal RuvC-like domain
DLGGKNTGFFSF

SEQ ID NO: 174 - protein, 12 aa, synthetic construct
  VAR_SEQ 1..12: note = N terminal RuvC-like domain
DLGVKNTGVFSA

SEQ ID NO: 175 - protein, 12 aa, synthetic construct
  VAR_SEQ 1..12: note = N terminal RuvC-like domain
DLGAKFTGVALY

SEQ ID NO: 176 - protein, 12 aa, synthetic construct
  VAR_SEQ 1..12: note = N terminal RuvC-like domain
DLGGKFTGVCLS

SEQ ID NO: 177 - protein, 12 aa, synthetic construct
  VAR_SEQ 1..12: note = N terminal RuvC-like domain
DLGGTYTGTFIT

SEQ ID NO: 178 - protein, 28 aa, synthetic construct
  VAR_SEQ 1..28: note = HNH-like domain
YDIDHIYPRSLTKDDSFDNLVLCERTAN

SEQ ID NO: 179 - protein, 28 aa, synthetic construct
  VAR_SEQ 1..28: note = HNH-like domain
DIDHIYPRSKVIKDDSFDNLVLVLKNEN

SEQ ID NO: 180 - protein, 27 aa, synthetic construct
  VAR_SEQ 1..27: note = HNH-like domain
DRDHIYPQSKIKDDSIDNLVLVNKTYN

SEQ ID NO: 181 - protein, 27 aa, synthetic construct
  VAR_SEQ 1..27: note = HNH-like domain
DIDHIYPRSKIKDDSITNRVLVEKDIN

SEQ ID NO: 182 - protein, 27 aa, synthetic construct
  VAR_SEQ 1..27: note = HNH-like domain
DIDHIYPQSKIKDDSISNRVLVCSSCN

SEQ ID NO: 183 - protein, 27 aa, synthetic construct
  VAR_SEQ 1..27: note = HNH-like domain
DIDHIYPQSKTMDDSLNNRVLVKKNYN

SEQ ID NO: 184 - protein, 27 aa, synthetic construct
  VAR_SEQ 1..27: note = HNH-like domain
DQDHIYPKSKIYDDSLENRVLVKKNLN

SEQ ID NO: 185 - protein, 27 aa, synthetic construct
  VAR_SEQ 1..27: note = HNH-like domain
QIDHIVPQSLVKDDSFDNRVLVVPSEN

SEQ ID NO: 186 - protein, 27 aa, synthetic construct
  VAR_SEQ 1..27: note = HNH-like domain
DIDHIIPQAFIKDNSIDNRVLTSSKEN

SEQ ID NO: 187 - protein, 27 aa, synthetic construct
  VAR_SEQ 1..27: note = HNH-like domain
DIDHIIPQAFLKDNSIDNKVLVSSASN

SEQ ID NO: 188 - protein, 27 aa, synthetic construct
  VAR_SEQ 1..27: note = HNH-like domain
DIDHIIPQAYTKDNSLDNRVLVSNITN

SEQ ID NO: 189 - protein, 27 aa, synthetic construct
  VAR_SEQ 1..27: note = HNH-like domain
DIDHIVPQSFITDNSIDNLVLTSSAGN

SEQ ID NO: 190 - protein, 27 aa, synthetic construct
  VAR_SEQ 1..27: note = HNH-like domain
DVDHIVPQSFLKDDSIDNKVLTRSDKN

SEQ ID NO: 191 - protein, 27 aa, synthetic construct
  VAR_SEQ 1..27: note = HNH-like domain
NIDHIYPQSMVKDDSLDNKVLVQSEIN

SEQ ID NO: 192 - protein, 27 aa, synthetic construct
  VAR_SEQ 1..27: note = HNH-like domain
DIDHILPQSLIKDDSLDNRVLVNATIN

SEQ ID NO: 193 - protein, 27 aa, synthetic construct
  VAR_SEQ 1..27: note = HNH-like domain
DIDHILPQSFIKDDSLENRVLVKKAVN

SEQ ID NO: 194 - protein, 27 aa, synthetic construct
  VAR_SEQ 1..27: note = HNH-like domain
EVDHIFPRSFIKDDSIDNKVLVIKKMN

SEQ ID NO: 195 - protein, 27 aa, synthetic construct
  VAR_SEQ 1..27: note = HNH-like domain
EVDHIIPRSYIKDDSFENKVLVYREEN

SEQ ID NO: 196 - protein, 27 aa, synthetic construct
  VAR_SEQ 1..27: note = HNH-like domain
DIDHIIPQAVTQNDSIDNRVLVARAEN

SEQ ID NO: 197 - protein, 27 aa, synthetic construct
  VAR_SEQ 1..27: note = HNH-like domain
EIDHIIPYSISFDDSSSNKLLVLAESN

SEQ ID NO: 198 - protein, 27 aa, synthetic construct
  VAR_SEQ 1..27: note = HNH-like domain
EIDHIIPYSLCFDDSSANKVLVHKQSN

SEQ ID NO: 199 - protein, 27 aa, synthetic construct
  VAR_SEQ 1..27: note = HNH-like domain
DIDHIIPYSRSMDDSYSNKVLVLSGEN

SEQ ID NO: 200 - protein, 27 aa, synthetic construct
  VAR_SEQ 1..27: note = HNH-like domain
DIDHIIPYSKSMDDSFNNKVLCLAEEN

SEQ ID NO: 201 - protein, 27 aa, synthetic construct
  VAR_SEQ 1..27: note = HNH-like domain
EIDHIYPYSRSFDDSYMNKVLVFTKQN

SEQ ID NO: 202 - protein, 27 aa, synthetic construct
  VAR_SEQ 1..27: note = HNH-like domain
QIDHIYPYSRSMDDSYMNKVLVLTDEN

SEQ ID NO: 203 - protein, 27 aa, synthetic construct
  VAR_SEQ 1..27: note = HNH-like domain
EIDHIIPFSRSFDDSLSNKILVLGSEN

SEQ ID NO: 204 - protein, 27 aa, synthetic construct
  VAR_SEQ 1..27: note = HNH-like domain
EIDHALPFSRTWDDSFNNKVLVLGSEN

SEQ ID NO: 205 - protein, 27 aa, synthetic construct
  VAR_SEQ 1..27: note = HNH-like domain
EIDHALPFSRTWDDSFNNKVLVLASEN

SEQ ID NO: 206 - protein, 27 aa, synthetic construct
  VAR_SEQ 1..27: note = HNH-like domain
EIDHIIPISISLDDSINNKVLVLSKAN

SEQ ID NO: 207 - protein, 27 aa, synthetic construct
  VAR_SEQ 1..27: note = HNH-like domain
EVDHIIPISISLDDSITNKVLVTHREN

SEQ ID NO: 208 - protein, 27 aa, synthetic construct
  VAR_SEQ 1..27: note = HNH-like domain
QVDHALPYSRSYDDSKNNKVLVLTHEN

SEQ ID NO: 209 - protein, 27 aa, synthetic construct
  VAR_SEQ 1..27: note = HNH-like domain
EVDHILPLSITFDDSLANKVLVYATAN

SEQ ID NO: 210 - protein, 27 aa, synthetic construct
  VAR_SEQ 1..27: note = HNH-like domain
EIDHIIPRSISFDDARSNKVLVYRSEN

SEQ ID NO: 211 - protein, 27 aa, synthetic construct
  VAR_SEQ 1..27: note = HNH-like domain
EVDHIIPRSVSFDNSYHNKVLVKQSEN

SEQ ID NO: 212 - protein, 27 aa, synthetic construct
  VAR_SEQ 1..27: note = HNH-like domain
DIDHILPYSITFDDSFRNKVLVTSQEN

SEQ ID NO: 213 - protein, 27 aa, synthetic construct
  VAR_SEQ 1..27: note = HNH-like domain
EIDHILPRSRSADDSFANKVLCLARAN

SEQ ID NO: 214 - protein, 27 aa, synthetic construct
  VAR_SEQ 1..27: note = HNH-like domain
EIEHLLPFSLTLDDSMANKTVCFRQAN

SEQ ID NO: 215 - protein, 27 aa, synthetic construct
  VAR_SEQ 1..27: note = HNH-like domain
DIDHILPFSVSLDDSAANKVVCLREAN

SEQ ID NO: 216 - protein, 27 aa, synthetic construct
  VAR_SEQ 1..27: note = HNH-like domain
DIDHLIPFSISWDDSAANKVVCMRYAN

SEQ ID NO: 217 - protein, 27 aa, synthetic construct
  VAR_SEQ 1..27: note = HNH-like domain
DIDHILPVAMTLDDSPANKIICMRYAN

SEQ ID NO: 218 - protein, 27 aa, synthetic construct
  VAR_SEQ 1..27: note = HNH-like domain
DVDHILPYSRTLDDSFPNRTLCLREAN

SEQ ID NO: 219 - protein, 27 aa, synthetic construct
  VAR_SEQ 1..27: note = HNH-like domain
EIEHILPFSRTLDDSLNNRTVAMRRAN

SEQ ID NO: 220 - protein, 27 aa, synthetic construct
  VAR_SEQ 1..27: note = HNH-like domain
EVDHIIPYSISWDDSYTNKVLTSAKCN

SEQ ID NO: 221 - protein, 27 aa, synthetic construct
  VAR_SEQ 1..27: note = HNH-like domain
QVDHILPWSRFGDDSYLNKTLCTARSN

SEQ ID NO: 222 - protein, 27 aa, synthetic construct
  VAR_SEQ 1..27: note = HNH-like domain
QVDHILPFSKTLDDSFANKVLAQHDAN

SEQ ID NO: 223 - protein, 27 aa, synthetic construct
  VAR_SEQ 1..27: note = HNH-like domain
QIDHAFPLSRSLDDSQSNKVLCLTSSN

SEQ ID NO: 224 - protein, 27 aa, synthetic construct
  VAR_SEQ 1..27: note = HNH-like domain
DIDHIVPRSISFDDSFSNLVIVNKLDN

SEQ ID NO: 225 - protein, 27 aa, synthetic construct
  VAR_SEQ 1..27: note = HNH-like domain
EIEHIIPYSMSYDNSQANKILTEKAEN

SEQ ID NO: 226 - protein, 27 aa, synthetic construct
  VAR_SEQ 1..27: note = HNH-like domain
EIDHVIPYSKSADDSWFNKLLVKKSTN

SEQ ID NO: 227 - protein, 27 aa, synthetic construct
  VAR_SEQ 1..27: note = HNH-like domain
EMDHILPYSRSLDNGWHNRVLVHGKDN

SEQ ID NO: 228 - protein, 27 aa, synthetic construct
  VAR_SEQ 1..27: note = HNH-like domain
EVDHIVPYSLILDNTINNKALVYAEEN

SEQ ID NO: 229 - protein, 27 aa, synthetic construct
  VAR_SEQ 1..27: note = HNH-like domain
EIEHVIPQSLYFDDSFSNKVICEAEVN

SEQ ID NO: 230 - protein, 27 aa, synthetic construct
  VAR_SEQ 1..27: note = HNH-like domain
DIEHIIPQARLFDDSFSNKTLEARSVN

SEQ ID NO: 231 - protein, 27 aa, synthetic construct
  VAR_SEQ 1..27: note = HNH-like domain
EIEHIVPKARVFDDSFSNKTLTFHRIN

SEQ ID NO: 232 - protein, 28 aa, synthetic construct
  VAR_SEQ 1..28: note = HNH-like domain
DKDHIIPQSMKKDDSIINNLVLVNKNAN

SEQ ID NO: 233 - protein, 27 aa, synthetic construct
  VAR_SEQ 1..27: note = HNH-like domain
EVEHIWPRSRSFDNSPRNKTLCRKDVN

SEQ ID NO: 234 - protein, 27 aa, synthetic construct
  VAR_SEQ 1..27: note = HNH-like domain
IVNHIIPYNRSFDDTYHNRVLTLTETK

SEQ ID NO: 235 - protein, 27 aa, synthetic construct
  VAR_SEQ 1..27: note = HNH-like domain
DMEHTIPKSISFDNSDQNLTLCESYYN

SEQ ID NO: 236 - protein, 27 aa, synthetic construct
  VAR_SEQ 1..27: note = HNH-like domain
DIEHTIPRSAGGDSTKMNLTLCSSRFN

SEQ ID NO: 237 - protein, 27 aa, synthetic construct
  VAR_SEQ 1..27: note = HNH-like domain
DIEHTIPRSISQDNSQMNKTLCSLKFN

SEQ ID NO: 238 - protein, 27 aa, synthetic construct
  VAR_SEQ 1..27: note = HNH-like domain
DIDHVIPLARGGRDSLDNMVLCQSDAN

SEQ ID NO: 239 - protein, 27 aa, synthetic construct
  VAR_SEQ 1..27: note = HNH-like domain
DIEHLFPIAESEDNGRNNLVISHSACN

SEQ ID NO: 240 - protein, 27 aa, synthetic construct
  VAR_SEQ 1..27: note = HNH-like domain
DVDHIFPRDDTADNSYGNKVVAHRQCN

SEQ ID NO: 241 - protein, 27 aa, synthetic construct
  VAR_SEQ 1..27: note = HNH-like domain
DIEHIVPQSLGGLSTDYNTIVTLKSVN

SEQ ID NO: 242 - protein, 27 aa, synthetic construct
  VAR_SEQ 1..27: note = HNH-like domain
ELDHIVPRTDGGSNRHENLAITCGACN

SEQ ID NO: 243 - protein, 28 aa, synthetic construct
  VAR_SEQ 1..28: note = HNH-like domain
EMDHIVPRKGVGSTNTRTNFAAVCAECN

SEQ ID NO: 244 - protein, 28 aa, synthetic construct
  VAR_SEQ 1..28: note = HNH-like domain
EMDHIVPRKGVGSTNTRVNLAAACAACN

SEQ ID NO: 245 - protein, 28 aa, synthetic construct
  VAR_SEQ 1..28: note = HNH-like domain
EMDHIVPRAGQGSTNTRENLVAVCHRCN

SEQ ID NO: 246 - protein, 33 aa, synthetic construct
  VAR_SEQ 1..33: note = HNH-like domain
EIDHILPRSLIKDARGIVFNAEPNLIYASSRGN

SEQ ID NO: 247 - protein, 33 aa, synthetic construct
  VAR_SEQ 1..33: note = HNH-like domain
EIDHIIPRSLTGRTKKTVFNSEANLIYCSSKGN

SEQ ID NO: 248 - protein, 33 aa, synthetic construct
  VAR_SEQ 1..33: note = HNH-like domain
EIDHIIPRSLTLKKSESIYNSEVNLIFVSAQGN

SEQ ID NO: 249 - protein, 33 aa, synthetic construct
  VAR_SEQ 1..33: note = HNH-like domain
EIDHIYPRSLSKKHFGVIFNSEVNLIYCSSQGN

SEQ ID NO: 250 - protein, 33 aa, synthetic construct
  VAR_SEQ 1..33: note = HNH-like domain
EIDHILPRSHTLKIYGTVFNPEGNLIYVHQKCN

SEQ ID NO: 251 - protein, 30 aa, synthetic construct
  VAR_SEQ 1..30: note = HNH-like domain
ELDHIIPRSHKKYGTLNDEANLICVTRGDN

SEQ ID NO: 252 - protein, 27 aa, synthetic construct
  VAR_SEQ 1..27: note = HNH-like domain
ELEHIVPHSFRQSNALSSLVLTWPGVN

SEQ ID NO: 253-302 - skipped (50 entries)

SEQ ID NO: 303 - DNA, 3333 bp, Neisseria meningitidis
  source 1..3333: mol_type = other DNA
atggtgcctaagaagaagagaaaggtggctgccttcaaacctaattcaatcaactacatcctcggcctcgatatcggcatcgcatccgtcggctgggcgatggtagaaattgacgaagaagaaaaccccatccgcctgattgatttgggcgtgcgcgtatttgagcgtgccgaagtaccgaaaacaggcgactcccttgccatggcaaggcgtttggcgcgcagtgttcgccgcctgacccgccgtcgcgcccaccgcctgcttcggacccgccgcctattgaaacgcgaaggcgtattacaagccgccaattttgacgaaaacggcttgattaaatccttaccgaatacaccatggcaacttcgcgcagccgcattagaccgcaaactgacgcctttagagtggtcggcagtcttgttgcatttaatcaaacatcgcggctatttatcgcaacggaaaaacgagggcgaaactgccgataaggagcttggcgctttgcttaaaggcgtagccggcaatgcccatgccttacagacaggcgatttccgcacaccggccgaattggctttaaataaatttgagaaagaaagcggccatatccgcaatcagcgcagcgattattcgcatacgttcagccgcaaagatttacaggcggagctgattttgctgtttgaaaaacaaaaagaatttggcaatccgcatgtttcaggcggccttaaagaaggtattgaaaccctactgatgacgcaacgccctgccctgtccggcgatgccgttcaaaaaatgttggggcattgcaccttcgaaccggcagagccgaaagccgctaaaaacacctacacagccgaacgtttcatctggctgaccaagctgaacaacctgcgtattttagagcaaggcagcgagcggccattgaccgataccgaacgcgccacgcttatggacgagccatacagaaaatccaaactgacttacgcacaagcccgtaagctgctgggtttagaagataccgcctttttcaaaggcttgcgctatggtaaagacaatgccgaagcctcaacattgatggaaatgaaggcctaccatgccatcagccgtgcactggaaaaagaaggattgaaagacaaaaaatccccattaaacctttctcccgaattacaagacgaaatcggcacggcattctccctgttcaaaaccgatgaagacattacaggccgtctgaaagaccgtatacagcccgaaatcttagaagcgctgttgaaacacatcagcttcgataagttcgtccaaatttccttgaaagcattgcgccgaattgtgcctctaatggaacaaggcaaacgttacgatgaagcctgcgccgaaatctacggagaccattacggcaagaagaatacggaagaaaagatttatctgccgccgattcccgccgacgaaatccgcaaccccgtcgtcttgcgcgccttatctcaagcacgtaaggtcattaacggcgtggtacgccgttacggctccccagctcgtatccatattgaaactgcaagggaagtaggtaaatcgtttaaagaccgcaaagaaattgagaaacgccaagaagaaaaccgcaaagaccgggaaaaagccgccgccaaattccgagagtatttccccaattttgtcggagaacccaaatccaaagatattctgaaactgcgcctgtacgagcaacaacacggcaaatgcctgtattcgggcaaagaaatcaacttaggccgtctgaacgaaaaaggctatgtcgaaatcgaccatgccctgccgttctcgcgcacatgggacgacagtttcaacaataaagtactggtattgggcagcgaaaaccaaaacaaaggcaatcaaaccccttacgaatacttcaacggcaaagacaacagccgcgaatggcaggaatttaaagcgcgtgtcgaaaccagccgtttcccgcgcagtaaaaaacaacggattctgctgcaaaaattcgatgaagacggctttaaagaacgcaatctgaacgacacgcgctacgtcaaccgtttcctgtgtcaatttgttgccgaccgtatgcggctgacaggtaaaggcaagaaacgtgtctttgcatccaacggacaaattaccaatctgttgcgcggcttttggggattgcgcaaagtgcgtgcggaaaacgaccgccatcacgccttggacgccgtcgtcgttgcctgctcgaccgttgccatgcagcagaaaattacccgttttgtacgctataaagagatgaacgcgtttgacggtaaaaccatagacaaagaaacaggagaagtgctgcatcaaaaaacacacttcccacaaccttgggaatttttcgcacaagaagtcatgattcgcgtcttcggcaaaccggacggcaaacccgaattcgaagaagccgataccctagaaaaactgcgcacgttgcttgccgaaaaattatcatctcgccccgaagccgtacacgaatacgttacgccactgtttgtttcacgcgcgcccaatcggaagatgagcgggcaagggcatatggagaccgtcaaatccgccaaacgactggacgaaggcgtcagcgtgttgcgcgtaccgctgacacagttaaaactgaaagacttggaaaaaatggtcaatcgggagcgcgaacctaagctatacgaagcactgaaagcacggctggaagcacataaagacgatcctgccaaagcctttgccgagccgttttacaaatacgataaagcaggcaaccgcacccaacaggtaaaagccgtacgcgtagagcaagtacagaaaaccggcgtatgggtgcgcaaccataacggtattgccgacaacgcaaccatggtgcgcgtagatgtgtttgagaaaggcgacaagtattatctggtaccgatttacagttggcaggtagcgaaagggattttgccggatagggctgttgtacaaggaaaagatgaagaagattggcaacttattgatgatagtttcaactttaaattctcattacaccctaatgatttagtcgaggttataacaaaaaaagctagaatgtttggttactttgccagctgccatcgaggcacaggtaatatcaatatacgcattcatgatcttgatcataaaattggcaaaaatggaatactggaaggtatcggcgtcaaaaccgccctttcattccaaaaataccaaattgacgaactgggcaaagaaatcagaccatgccgtctgaaaaaacgcccgcctgtccgttacccatacgatgttccagattacgctgcagctccagcagcgaagaaaaagaagctggattaa

SEQ ID NO: 304-305 - skipped (2 entries)

SEQ ID NO: 306 - protein, 984 aa, Campylobacter jejuni
MARILAFDIGISSIGWAFSENDELKDCGVRIFTKVENPKTGESLALPRRLARSARKRLARRKARLNHLKHLIANEFKLNYEDYQSFDESLAKAYKGSLISPYELRFRALNELLSKQDFARVILHIAKRRGYDDIKNSDDKEKGAILKAIKQNEEKLANYQSVGEYLYKEYFQKFKENSKEFTNVRNKKESYERCIAQSFLKDELKLIFKKQREFGFSFSKKFEEEVLSVAFYKRALKDFSHLVGNCSFFTDEKRAPKNSPLAFMFVALTRIINLLNNLKNTEGILYTKDDLNALLNEVLKNGTLTYKQTKKLLGLSDDYEFKGEKGTYFIEFKKYKEFIKALGEHNLSQDDLNEIAKDITLIKDEIKLKKALAKYDLNQNQIDSLSKLEFKDHLNISFKALKLVTPLMLEGKKYDEACNELNLKVAINEDKKDFLPAFNETYYKDEVTNPVVLRAIKEYRKVLNALLKKYGKVHKINIELAREVGKNHSQRAKIEKEQNENYKAKKDAELECEKLGLKINSKNILKLRLFKEQKEFCAYSGEKIKISDLQDEKMLEIDHIYPYSRSFDDSYMNKVLVFTKQNQEKLNQTPFEAFGNDSAKWQKIEVLAKNLPTKKQKRILDKNYKDKEQKNFKDRNLNDTRYIARLVLNYTKDYLDFLPLSDDENTKLNDTQKGSKVHVEAKSGMLTSALRHTWGFSAKDRNNHLHHAIDAVIIAYANNSIVKAFSDFKKEQESNSAELYAKKISELDYKNKRKFFEPFSGFRQKVLDKIDEIFVSKPERKKPSGALHEETFRKEEEFYQSYGGKEGVLKALELGKIRKVNGKIVKNGDMFRVDIFKHKKTNKFYAVPIYTMDFALKVLPNKAVARSKKGEIKDWILMDENYEFCFSLYKDSLILIQTKDMQEPEFVYYNAFTSSTVSLIVSKHDNKFETLSKNQKILFKNANEKEVIAKSIGIQNLKVFEKYIVSALGEVTKAEFRQREDFKK

SEQ ID NO: 307 - protein, 1436 aa, Bacteroides fragilis
MKRILGLDLGTNSIGWALVNEAENKDERSSIVKLGVRVNPLTVDELTNFEKGKSITTNADRTLKRGMRRNLQRYKLRRETLTEVLKEHKLITEDTILSENGNRTTFETYRLRAKAVTEEISLEEFARVLLMINKKRGYKSSRKAKGVEEGTLIDGMDIARELYNNNLTPGELCLQLLDAGKKFLPDFYRSDLQNELDRIWEKQKEYYPEILTDVLKEELRGKKRDAVWAICAKYFVWKENYTEWNKEKGKTEQQEREHKLEGIYSKRKRDEAKRENLQWRVNGLKEKLSLEQLVIVFQEMNTQINNSSGYLGAISDRSKELYFNKQTVGQYQMEMLDKNPNASLRNMVFYRQDYLDEFNMLWEKQAVYHKELTEELKKEIRDIIIFYQRRLKSQKGLIGFCEFESRQIEVDIDGKKKIKTVGNRVISRSSPLFQEFKIWQILNNIEVTVVGKKRKRRKLKENYSALFEELNDAEQLELNGSRRLCQEEKELLAQELFIRDKMTKSEVLKLLFDNPQELDLNFKTIDGNKTGYALFQAYSKMIEMSGHEPVDFKKPVEKVVEYIKAVFDLLNWNTDILGFNSNEELDNQPYYKLWHLLYSFEGDNTPTGNGRLIQKMTELYGFEKEYATILANVSFQDDYGSLSAKAIHKILPHLKEGNRYDVACVYAGYRHSESSLTREEIANKVLKDRLMLLPKNSLHNPVVEKILNQMVNVINVIIDIYGKPDEIRVELARELKKNAKEREELTKSIAQTTKAHEEYKTLLQTEFGLTNVSRTDILRYKLYKELESCGYKTLYSNTYISREKLFSKEFDIEHIIPQARLFDDSFSNKTLEARSVNIEKGNKTAYDFVKEKFGESGADNSLEHYLNNIEDLFKSGKISKTKYNKLKMAEQDIPDGFIERDLRNTQYIAKKALSMLNEISHRVVATSGSVTDKLREDWQLIDVMKELNWEKYKALGLVEYFEDRDGRQIGRIKDWTKRNDHRHHAMDALTVAFTKDVFIQYFNNKNASLDPNANEHAIKNKYFQNGRAIAPMPLREFRAEAKKHLENTLISIKAKNKVITGNINKTRKKGGVNKNMQQTPRGQLHLETIYGSGKQYLTKEEKVNASFDMRKIGTVSKSAYRDALLKRLYENDNDPKKAFAGKNSLDKQPIWLDKEQMRKVPEKVKIVTLEAIYTIRKEISPDLKVDKVIDVGVRKILIDRLNEYGNDAKKAFSNLDKNPIWLNKEKGISIKRVTISGISNAQSLHVKKDKDGKPILDENGRNIPVDFVNTGNNHHVAVYYRPVIDKRGQLVVDEAGNPKYELEEVVVSFFEAVTRANLGLPIIDKDYKTTEGWQFLFSMKQNEYFVFPNEKTGFNPKEIDLLDVENYGLISPNLFRVQKFSLKNYVFRHHLETTIKDTSSILRGITWIDFRSSKGLDTIVKVRVNHIGQIVSVGEY

SEQ ID NO: 308 - protein, 1420 aa, Bifidobacterium bifidum
MSRKNYVDDYAISLDIGNASVGWSAFTPNYRLVRAKGHELIGVRLFDPADTAESRRMARTTRRRYSRRRWRLRLLDALFDQALSEIDPSFLARRKYSWVHPDDENNADCWYGSVLFDSNEQDKRFYEKYPTIYHLRKALMEDDSQHDIREIYLAIHHMVKYRGNFLVEGTLESSNAFKEDELLKLLGRITRYEMSEGEQNSDIEQDDENKLVAPANGQLADALCATRGSRSMRVDNALEALSAVNDLSREQRAIVKAIFAGLEGNKLDLAKIFVSKEFSSENKKILGIYFNKSDYEEKCVQIVDSGLLDDEEREFLDRMQGQYNAIALKQLLGRSTSVSDSKCASYDAHRANWNLIKLQLRTKENEKDINENYGILVGWKIDSGQRKSVRGESAYENMRKKANVFFKKMIETSDLSETDKNRLIHDIEEDKLFPIQRDSDNGVIPHQLHQNELKQIIKKQGKYYPFLLDAFEKDGKQINKIEGLLTFRVPYFVGPLVVPEDLQKSDNSENHWMVRKKKGEITPWNFDEMVDKDASGRKFIERLVGTDSYLLGEPTLPKNSLLYQEYEVLNELNNVRLSVRTGNHWNDKRRMRLGREEKTLLCQRLFMKGQTVTKRTAENLLRKEYGRTYELSGLSDESKFTSSLSTYGKMCRIFGEKYVNEHRDLMEKIVELQTVFEDKETLLHQLRQLEGISEADCALLVNTHYTGWGRLSRKLLTTKAGECKISDDFAPRKHSIIEIMRAEDRNLMEIITDKQLGFSDWIEQENLGAENGSSLMEVVDDLRVSPKVKRGIIQSIRLIDDISKAVGKRPSRIFLELADDIQPSGRTISRKSRLQDLYRNANLGKEFKGIADELNACSDKDLQDDRLFLYYTQLGKDMYTGEELDLDRLSSAYDIDHIIPQAVTQNDSIDNRVLVARAENARKTDSFTYMPQIADRMRNFWQILLDNGLISRVKFERLTRQNEFSEREKERFVQRSLVETRQIMKNVATLMRQRYGNSAAVIGLNAELTKEMHRYLGFSHKNRDINDYHHAQDALCVGIAGQFAANRGFFADGEVSDGAQNSYNQYLRDYLRGYREKLSAEDRKQGRAFGFIVGSMRSQDEQKRVNPRTGEVVWSEEDKDYLRKVMNYRKMLVTQKVGDDFGALYDETRYAATDPKGIKGIPFDGAKQDTSLYGGFSSAKPAYAVLIESKGKTRLVNVTMQEYSLLGDRPSDDELRKVLAKKKSEYAKANILLRHVPKMQLIRYGGGLMVIKSAGELNNAQQLWLPYEEYCYFDDLSQGKGSLEKDDLKKLLDSILGSVQCLYPWHRFTEEELADLHVAFDKLPEDEKKNVITGIVSALHADAKTANLSIVGMTGSWRRMNNKSGYTFSDEDEFIFQSPSGLFEKRVTVGELKRKAKKEVNSKYRTNEKRLPTLSGASQP

SEQ ID NO: 309 - protein, 1397 aa, Veillonella atypica
METQTSNQLITSHLKDYPKQDYFVGLDIGTNSVGWAVTNTSYELLKFHSHKMWGSRLFEEGESAVTRRGFRSMRRRLERRKLRLKLLEELFADAMAQVDSTFFIRLHESKYHYEDKTTGHSSKHILFIDEDYTDQDYFTEYPTIYHLRKDLMENGTDDIRKLFLAVHHILKYRGNFLYEGATFNSNAFTFEDVLKQALVNITFNCFDTNSAISSISNILMESGKTKSDKAKAIERLVDTYTVFDEVNTPDKPQKEQVKEDKKTLKAFANLVLGLSANLIDLFGSVEDIDDDLKKLQIVGDTYDEKRDELAKVWGDEIHIIDDCKSVYDAIILMSIKEPGLTISQSKVKAFDKHKEDLVILKSLLKLDRNVYNEMFKSDKKGLHNYVHYIKQGRTEETSCSREDFYKYTKKIVEGLADSKDKEYILNEIELQTLLPLQRIKDNGVIPYQLHLEELKVILDKCGPKFPFLHTVSDGFSVTEKLIKMLEFRIPYYVGPLNTHHNIDNGGFSWAVRKQAGRVTPWNFEEKIDREKSAAAFIKNLTNKCTYLFGEDVLPKSSLLYSEFMLLNELNNVRIDGKALAQGVKQHLIDSIFKQDHKKMTKNRIELFLKDNNYITKKHKPEITGLDGEIKNDLTSYRDMVRILGNNFDVSMAEDIITDITIFGESKKMLRQTLRNKFGSQLNDETIKKLSKLRYRDWGRLSKKLLKGIDGCDKAGNGAPKTIIELMRNDSYNLMEILGDKFSFMECIEEENAKLAQGQVVNPHDIIDELALSPAVKRAVWQALRIVDEVAHIKKALPSRIFVEVARTNKSEKKKKDSRQKRLSDLYSAIKKDDVLQSGLQDKEFGALKSGLANYDDAALRSKKLYLYYTQMGRCAYTGNIIDLNQLNTDNYDIDHIYPRSLTKDDSFDNLVLCERTANAKKSDIYPIDNRIQTKQKPFWAFLKHQGLISERKYERLTRIAPLTADDLSGFIARQLVETNQSVKATTTLLRRLYPDIDVVFVKAENVSDFRHNNNFIKVRSLNHHHHAKDAYLNIVVGNVYHEKFTRNFRLFFKKNGANRTYNLAKMFNYDVICTNAQDGKAWDVKTSMNTVKKMMASNDVRVTRRLLEQSGALADATIYKASVAAKAKDGAYIGMKTKYSVFADVTKYGGMTKIKNAYSIIVQYTGKKGEEIKEIVPLPIYLINRNATDIELIDYVKSVIPKAKDISIKYRKLCINQLVKVNGFYYYLGGKTNDKIYIDNAIELVVPHDIATYIKLLDKYDLLRKENKTLKASSITTSIYNINTSTVVSLNKVGIDVFDYFMSKLRTPLYMKMKGNKVDELSSTGRSKFIKMTLEEQSIYLLEVLNLLTNSKTTFDVKPLGITGSRSTIGVKIHNLDEFKIINESITGLYSNEVTIV

SEQ ID NO: 310 - protein, 1363 aa, Lactobacillus rhamnosus
MTKLNQPYGIGLDIGSNSIGFAVVDANSHLLRLKGETAIGARLFREGQSAADRRGSRTTRRRLSRTRWRLSFLRDFFAPHITKIDPDFFLRQKYSEISPKDKDRFKYEKRLFNDRTDAEFYEDYPSMYHLRLHLMTHTHKADPREIFLAIHHILKSRGHFLTPGAAKDFNTDKVDLEDIFPALTEAYAQVYPDLELTFDLAKADDFKAKLLDEQATPSDTQKALVNLLLSSDGEKEIVKKRKQVLTEFAKAITGLKTKFNLALGTEVDEADASNWQFSMGQLDDKWSNIETSMTDQGTEIFEQIQELYRARLLNGIVPAGMSLSQAKVADYGQHKEDLELFKTYLKKLNDHELAKTIRGLYDRYINGDDAKPFLREDFVKALTKEVTAHPNEVSEQLLNRMGQANFMLKQRTKANGAIPIQLQQRELDQIIANQSKYYDWLAAPNPVEAHRWKMPYQLDELLNFHIPYYVGPLITPKQQAESGENVFAWMVRKDPSGNITPYNFDEKVDREASANTFIQRMKTTDTYLIGEDVLPKQSLLYQKYEVLNELNNVRINNECLGTDQKQRLIREVFERHSSVTIKQVADNLVAHGDFARRPEIRGLADEKRFLSSLSTYHQLKEILHEAIDDPTKLLDIENIITWSTVFEDHTIFETKLAEIEWLDPKKINELSGIRYRGWGQFSRKLLDGLKLGNGHTVIQELMLSNHNLMQILADETLKETMTELNQDKLKTDDIEDVINDAYTSPSNKKALRQVLRVVEDIKHAANGQDPSWLFIETADGTGTAGKRTQSRQKQIQTVYANAAQELIDSAVRGELEDKIADKASFTDRLVLYFMQGGRDIYTGAPLNIDQLSHYDIDHILPQSLIKDDSLDNRVLVNATINREKNNVFASTLFAGKMKATWRKWHEAGLISGRKLRNLMLRPDEIDKFAKGFVARQLVETRQIIKLTEQIAAAQYPNTKIIAVKAGLSHQLREELDFPKNRDVNHYHHAFDAFLAARIGTYLLKRYPKLAPFFTYGEFAKVDVKKFREFNFIGALTHAKKNIIAKDTGEIVWDKERDIRELDRIYNFKRMLITHEVYFETADLFKQTIYAAKDSKERGGSKQLIPKKQGYPTQVYGGYTQESGSYNALVRVAEADTTAYQVIKISAQNASKIASANLKSREKGKQLLNEIVVKQLAKRRKNWKPSANSFKIVIPRFGMGTLFQNAKYGLFMVNSDTYYRNYQELWLSRENQKLLKKLFSIKYEKTQMNHDALQVYKAIIDQVEKFFKLYDINQFRAKLSDAIERFEKLPINTDGNKIGKTETLRQILIGLQANGTRSNVKNLGIKTDLGLLQVGSGIKLDKDTQIVYQSPSGLFKRRIPLADL

SEQ ID NO: 311 - protein, 1365 aa, Filifactor alocis
MTKEYYLGLDVGTNSVGWAVTDSQYNLCKFKKKDMWGIRLFESANTAKDRRLQRGNRRRLERKKQRIDLLQEIFSPEICKIDPTFFIRLNESRLHLEDKSNDFKYPLFIEKDYSDIEYYKEFPTIFHLRKHLIESEEKQDIRLIYLALHNIIKTRGHFLIDGDLQSAKQLRPILDTFLLSLQEEQNLSVSLSENQKDEYEEILKNRSIAKSEKVKKLKNLFEISDELEKEEKKAQSAVIENFCKFIVGNKGDVCKFLRVSKEELEIDSFSFSEGKYEDDIVKNLEEKVPEKVYLFEQMKAMYDWNILVDILETEEYISFAKVKQYEKHKTNLRLLRDIILKYCTKDEYNRMFNDEKEAGSYTAYVGKLKKNNKKYWIEKKRNPEEFYKSLGKLLDKIEPLKEDLEVLTMMIEECKNHTLLPIQKNKDNGVIPHQVHEVELKKILENAKKYYSFLTETDKDGYSVVQKIESIFRFRIPYYVGPLSTRHQEKGSNVWMVRKPGREDRIYPWNMEEIIDFEKSNENFITRMTNKCTYLIGEDVLPKHSLLYSKYMVLNELNNVKVRGKKLPTSLKQKVFEDLFENKSKVTGKNLLEYLQIQDKDIQIDDLSGFDKDFKTSLKSYLDFKKQIFGEEIEKESIQNMIEDIIKWITIYGNDKEMLKRVIRANYSNQLTEEQMKKITGFQYSGWGNFSKMFLKGISGSDVSTGETFDIITAMWETDNNLMQILSKKFTFMDNVEDFNSGKVGKIDKITYDSTVKEMFLSPENKRAVWQTIQVAEEIKKVMGCEPKKIFIEMARGGEKVKKRTKSRKAQLLELYAACEEDCRELIKEIEDRDERDFNSMKLFLYYTQFGKCMYSGDDIDINELIRGNSKWDRDHIYPQSKIKDDSIDNLVLVNKTYNAKKSNELLSEDIQKKMHSFWLSLLNKKLITKSKYDRLTRKGDFTDEELSGFIARQLVETRQSTKAIADIFKQIYSSEVVYVKSSLVSDFRKKPLNYLKSRRVNDYHHAKDAYLNIVVGNVYNKKFTSNPIQWMKKNRDTNYSLNKVFEHDVVINGEVIWEKCTYHEDTNTYDGGTLDRIRKIVERDNILYTEYAYCEKGELFNATIQNKNGNSTVSLKKGLDVKKYGGYFSANTSYFSLIEFEDKKGDRARHIIGVPIYIANMLEHSPSAFLEYCEQKGYQNVRILVEKIKKNSLLIINGYPLRIRGENEVDTSFKRAIQLKLDQKNYELVRNIEKFLEKYVEKKGNYPIDENRDHITHEKMNQLYEVLLSKMKKFNKKGMADPSDRIEKSKPKFIKLEDLIDKINVINKMLNLLRCDNDTKADLSLIELPKNAGSFVVKKNTIGKSKIILVNQSVTGLYENRREL

SEQ ID NO: 312 - protein, 1389 aa, Oenococcus kitaharae
MARDYSVGLDIGTSSVGWAAIDNKYHLIRAKSKNLIGVRLFDSAVTAEKRRGYRTTRRRLSRRHWRLRLLNDIFAGPLTDFGDENFLARLKYSWVHPQDQSNQAHFAAGLLFDSKEQDKDFYRKYPTIYHLRLALMNDDQKHDLREVYLAIHHLVKYRGHFLIEGDVKADSAFDVHTFADAIQRYAESNNSDENLLGKIDEKKLSAALTDKHGSKSQRAETAETAFDILDLQSKKQIQAILKSVVGNQANLMAIFGLDSSAISKDEQKNYKFSFDDADIDEKIADSEALLSDTEFEFLCDLKAAFDGLTLKMLLGDDKTVSAAMVRRFNEHQKDWEYIKSHIRNAKNAGNGLYEKSKKFDGINAAYLALQSDNEDDRKKAKKIFQDEISSADIPDDVKADFLKKIDDDQFLPIQRTKNNGTIPHQLHRNELEQIIEKQGIYYPFLKDTYQENSHELNKITALINFRVPYYVGPLVEEEQKIADDGKNIPDPTNHWMVRKSNDTITPWNLSQVVDLDKSGRRFIERLTGTDTYLIGEPTLPKNSLLYQKFDVLQELNNIRVSGRRLDIRAKQDAFEHLFKVQKTVSATNLKDFLVQAGYISEDTQIEGLADVNGKNFNNALTTYNYLVSVLGREFVENPSNEELLEEITELQTVFEDKKVLRRQLDQLDGLSDHNREKLSRKHYTGWGRISKKLLTTKIVQNADKIDNQTFDVPRMNQSIIDTLYNTKMNLMEIINNAEDDFGVRAWIDKQNTTDGDEQDVYSLIDELAGPKEIKRGIVQSFRILDDITKAVGYAPKRVYLEFARKTQESHLTNSRKNQLSTLLKNAGLSELVTQVSQYDAAALQNDRLYLYFLQQGKDMYSGEKLNLDNLSNYDIDHIIPQAYTKDNSLDNRVLVSNITNRRKSDSSNYLPALIDKMRPFWSVLSKQGLLSKHKFANLTRTRDFDDMEKERFIARSLVETRQIIKNVASLIDSHFGGETKAVAIRSSLTADMRRYVDIPKNRDINDYHHAFDALLFSTVGQYTENSGLMKKGQLSDSAGNQYNRYIKEWIHAARLNAQSQRVNPFGFVVGSMRNAAPGKLNPETGEITPEENADWSIADLDYLHKVMNFRKITVTRRLKDQKGQLYDESRYPSVLHDAKSKASINFDKHKPVDLYGGFSSAKPAYAALIKFKNKFRLVNVLRQWTYSDKNSEDYILEQIRGKYPKAEMVLSHIPYGQLVKKDGALVTISSATELHNFEQLWLPLADYKLINTLLKTKEDNLVDILHNRLDLPEMTIESAFYKAFDSILSFAFNRYALHQNALVKLQAHRDDFNALNYEDKQQTLERILDALHASPASSDLKKINLSSGFGRLFSPSHFTLADTDEFIFQSVTGLFSTQKTVAQLYQETK

SEQ ID NO: 313 - protein, 1323 aa, Fructobacillus fructosus
MVYDVGLDIGTGSVGWVALDENGKLARAKGKNLVGVRLFDTAQTAADRRGFRTTRRRLSRRKWRLRLLDELFSAEINEIDSSFFQRLKYSYVHPKDEENKAHYYGGYLFPTEEETKKFHRSYPTIYHLRQELMAQPNKRFDIREIYLAIHHLVKYRGHFLSSQEKITIGSTYNPEDLANAIEVYADEKGLSWELNNPEQLTEIISGEAGYGLNKSMKADEALKLFEFDNNQDKVAIKTLLAGLTGNQIDFAKLFGKDISDKDEAKLWKLKLDDEALEEKSQTILSQLTDEEIELFHAVVQAYDGFVLIGLLNGADSVSAAMVQLYDQHREDRKLLKSLAQKAGLKHKRFSEIYEQLALATDEATIKNGISTARELVEESNLSKEVKEDTLRRLDENEFLPKQRTKANSVIPHQLHLAELQKILQNQGQYYPFLLDTFEKEDGQDNKIEELLRFRIPYYVGPLVTKKDVEHAGGDADNHWVERNEGFEKSRVTPWNFDKVFNRDKAARDFIERLTGNDTYLIGEKTLPQNSLRYQLFTVLNELNNVRVNGKKFDSKTKADLINDLFKARKTVSLSALKDYLKAQGKGDVTITGLADESKFNSSLSSYNDLKKTFDAEYLENEDNQETLEKIIEIQTVFEDSKIASRELSKLPLDDDQVKKLSQTHYTGWGRLSEKLLDSKIIDERGQKVSILDKLKSTSQNFMSIINNDKYGVQAWITEQNTGSSKLTFDEKVNELTTSPANKRGIKQSFAVLNDIKKAMKEEPRRVYLEFAREDQTSVRSVPRYNQLKEKYQSKSLSEEAKVLKKTLDGNKNKMSDDRYFLYFQQQGKDMYTGRPINFERLSQDYDIDHIIPQAFTKDDSLDNRVLVSRPENARKSDSFAYTDEVQKQDGSLWTSLLKSGFINRKKYERLTKAGKYLDGQKTGFIARQLVETRQIIKNVASLIEGEYENSKAVAIRSEITADMRLLVGIKKHREINSFHHAFDALLITAAGQYMQNRYPDRDSTNVYNEFDRYTNDYLKNLRQLSSRDEVRRLKSFGFVVGTMRKGNEDWSEENTSYLRKVMMFKNILTTKKTEKDRGPLNKETIFSPKSGKKLIPLNSKRSDTALYGGYSNVYSAYMTLVRANGKNLLIKIPISIANQIEVGNLKINDYIVNNPAIKKFEKILISKLPLGQLVNEDGNLIYLASNEYRHNAKQLWLSTTDADKIASISENSSDEELLEAYDILTSENVKNRFPFFKKDIDKLSQVRDEFLDSDKRIAVIQTILRGLQIDAAYQAPVKIISKKVSDWHKLQQSGGIKLSDNSEMIYQSATGIFETRVKISDLL

SEQ ID NO: 314 - protein, 1329 aa, Catenibacterium mitsuokai
IVDYCIGLDLGTGSVGWAVVDMNHRLMKRNGKHLWGSRLFSNAETAANRRASRSIRRRYNKRRERIRLLRAILQDMVLEKDPTFFIRLEHTSFLDEEDKAKYLGTDYKDNYNLFIDEDFNDYTYYHKYPTIYHLRKALCESTEKADPRLIYLALHHIVKYRGNFLYEGQKFNMDASNIEDKLSDIFTQFTSFNNIPYEDDEKKNLEILEILKKPLSKKAKVDEVMTLIAPEKDYKSAFKELVTGIAGNKMNVTKMILCEPIKQGDSEIKLKFSDSNYDDQFSEVEKDLGEYVEFVDALHNVYSWVELQTIMGATHTDNASISEAMVSRYNKHHDDLKLLKDCIKNNVPNKYFDMFRNDSEKSKGYYNYINRPSKAPVDEFYKYVKKCIEKVDTPEAKQILNDIELENFLLKQNSRTNGSVPYQMQLDEMIKIIDNQAEYYPILKEKREQLLSILTFRIPYYFGPLNETSEHAWIKRLEGKENQRILPWNYQDIVDVDATAEGFIKRMRSYCTYFPDEEVLPKNSLIVSKYEVYNELNKIRVDDKLLEVDVKNDIYNELFMKNKTVTEKKLKNWLVNNQCCSKDAEIKGFQKENQFSTSLTPWIDFTNIFGKIDQSNFDLIENIIYDLTVFEDKKIMKRRLKKKYALPDDKVKQILKLKYKDWSRLSKKLLDGIVADNRFGSSVTVLDVLEMSRLNLMEIINDKDLGYAQMIEEATSCPEDGKFTYEEVERLAGSPALKRGIWQSLQIVEEITKVMKCRPKYIYIEFERSEEAKERTESKIKKLENVYKDLDEQTKKEYKSVLEELKGFDNTKKISSDSLFLYFTQLGKCMYSGKKLDIDSLDKYQIDHIVPQSLVKDDSFDNRVLVVPSENQRKLDDLVVPFDIRDKMYRFWKLLFDHELISPKKFYSLIKTEYTERDEERFINRQLVETRQITKNVTQIIEDHYSTTKVAAIRANLSHEFRVKNHIYKNRDINDYHHAHDAYIVALIGGFMRDRYPNMHDSKAVYSEYMKMFRKNKNDQKRWKDGFVINSMNYPYEVDGKLIWNPDLINEIKKCFYYKDCYCTTKLDQKSGQLFNLTVLSNDAHADKGVTKAVVPVNKNRSDVHKYGGFSGLQYTIVAIEGQKKKGKKTELVKKISGVPLHLKAASINEKINYIEEKEGLSDVRIIKDNIPVNQMIEMDGGEYLLTSPTEYVNARQLVLNEKQCALIADIYNAIYKQDYDNLDDILMIQLYIELTNKMKVLYPAYRGIAEKFESMNENYVVISKEEKANIIKQMLIVMHRGPQNGNIVYDDFKISDRIGRLKTKNHNLNNIVFISQSPTGIYTKKYKL

SEQ ID NO: 315 - protein, 1348 aa, Finegoldia magna
MKSEKKYYIGLDVGTNSVGWAVTDEFYNILRAKGKDLWGVRLFEKADTAANTRIFRSGRRRNDRKGMRLQILREIFEDEIKKVDKDFYDRLDESKFWAEDKKVSGKYSLFNDKNFSDKQYFEKFPTIFHLRKYLMEEHGKVDIRYYFLAINQMMKRRGHFLIDGQISHVTDDKPLKEQLILLINDLLKIELEEELMDSIFEILADVNEKRTDKKNNLKELIKGQDFNKQEGNILNSIFESIVTGKAKIKNIISDEDILEKIKEDNKEDFVLTGDSYEENLQYFEEVLQENITLFNTLKSTYDFLILQSILKGKSTLSDAQVERYDEHKKDLEILKKVIKKYDEDGKLFKQVFKEDNGNGYVSYIGYYLNKNKKITAKKKISNIEFTKYVKGILEKQCDCEDEDVKYLLGKIEQENFLLKQISSINSVIPHQIHLFELDKILENLAKNYPSFNNKKEEFTKIEKIRKTFTFRIPYYVGPLNDYHKNNGGNAWIFRNKGEKIRPWNFEKIVDLHKSEEEFIKRMLNQCTYLPEETVLPKSSILYSEYMVLNELNNLRINGKPLDTDVKLKLIEELFKKKTKVTLKSIRDYMVRNNFADKEDFDNSEKNLEIASNMKSYIDFNNILEDKFDVEMVEDLIEKITIHTGNKKLLKKYIEETYPDLSSSQIQKIINLKYKDWGRLSRKLLDGIKGTKKETEKTDTVINFLRNSSDNLMQIIGSQNYSFNEYIDKLRKKYIPQEISYEVVENLYVSPSVKKMIWQVIRVTEEITKVMGYDPDKIFIEMAKSEEEKKTTISRKNKLLDLYKAIKKDERDSQYEKLLTGLNKLDDSDLRSRKLYLYYTQMGRDMYTGEKIDLDKLFDSTHYDKDHIIPQSMKKDDSIINNLVLVNKNANQTTKGNIYPVPSSIRNNPKIYNYWKYLMEKEFISKEKYNRLIRNTPLTNEELGGFINRQLVETRQSTKAIKELFEKFYQKSKIIPVKASLASDLRKDMNTLKSREVNDLHHAHDAFLNIVAGDVWNREFTSNPINYVKENREGDKVKYSLSKDFTRPRKSKGKVIWTPEKGRKLIVDTLNKPSVLISNESHVKKGELFNATIAGKKDYKKGKIYLPLKKDDRLQDVSKYGGYKAINGAFFFLVEHTKSKKRIRSIELFPLHLLSKFYEDKNTVLDYAINVLQLQDPKIIIDKINYRTEIIIDNFSYLISTKSNDGSITVKPNEQMYWRVDEISNLKKIENKYKKDAILTEEDRKIMESYIDKIYQQFKAGKYKNRRTTDTIIEKYEIIDLDTLDNKQLYQLLVAFISLSYKTSNNAVDFTVIGLGTECGKPRITNLPDNTYLVYKSITGIYEKRIRIK

SEQ ID NO: 316 - protein, 1384 aa, Coriobacterium glomerans
MKLRGIEDDYSIGLDMGTSSVGWAVTDERGTLAHFKRKPTWGSRLFREAQTAAVARMPRGQRRRYVRRRWRLDLLQKLFEQQMEQADPDFFIRLRQSRLLRDDRAEEHADYRWPLFNDCKFTERDYYQRFPTIYHVRSWLMETDEQADIRLIYLALHNIVKHRGNFLREGQSLSAKSARPDEALNHLRETLRVWSSERGFECSIADNGSILAMLTHPDLSPSDRRKKIAPLFDVKSDDAAADKKLGIALAGAVIGLKTEFKNIFGDFPCEDSSIYLSNDEAVDAVRSACPDDCAELFDRLCEVYSAYVLQGLLSYAPGQTISANMVEKYRRYGEDLALLKKLVKIYAPDQYRMFFSGATYPGTGIYDAAQARGYTKYNLGPKKSEYKPSESMQYDDFRKAVEKLFAKTDARADERYRMMMDRFDKQQFLRRLKTSDNGSIYHQLHLEELKAIVENQGRFYPFLKRDADKLVSLVSFRIPYYVGPLSTRNARTDQHGENRFAWSERKPGMQDEPIFPWNWESIIDRSKSAEKFILRMTGMCTYLQQEPVLPKSSLLYEEFCVLNELNGAHWSIDGDDEHRFDAADREGIIEELFRRKRTVSYGDVAGWMERERNQIGAHVCGGQGEKGFESKLGSYIFFCKDVFKVERLEQSDYPMIERIILWNTLFEDRKILSQRLKEEYGSRLSAEQIKTICKKRFTGWGRLSEKFLTGITVQVDEDSVSIMDVLREGCPVSGKRGRAMVMMEILRDEELGFQKKVDDFNRAFFAENAQALGVNELPGSPAVRRSLNQSIRIVDEIASIAGKAPANIFIEVTRDEDPKKKGRRTKRRYNDLKDALEAFKKEDPELWRELCETAPNDMDERLSLYFMQRGKCLYSGRAIDIHQLSNAGIYEVDHIIPRTYVKDDSLENKALVYREENQRKTDMLLIDPEIRRRMSGYWRMLHEAKLIGDKKFRNLLRSRIDDKALKGFIARQLVETGQMVKLVRSLLEARYPETNIISVKASISHDLRTAAELVKCREANDFHHAHDAFLACRVGLFIQKRHPCVYENPIGLSQVVRNYVRQQADIFKRCRTIPGSSGFIVNSFMTSGFDKETGEIFKDDWDAEAEVEGIRRSLNFRQCFISRMPFEDHGVFWDATIYSPRAKKTAALPLKQGLNPSRYGSFSREQFAYFFIYKARNPRKEQTLFEFAQVPVRLSAQIRQDENALERYARELAKDQGLEFIRIERSKILKNQLIEIDGDRLCITGKEEVRNACELAFAQDEMRVIRMLVSEKPVSRECVISLFNRILLHGDQASRRLSKQLKLALLSEAFSEASDNVQRNVVLGLIAIFNGSTNMVNLSDIGGSKFAGNVRIKYKKELASPKVNVHLIDQSVTGMFERRTKIGL

SEQ ID NO: 317 - protein, 1391 aa, Eubacterium yurii
MENKQYYIGLDVGTNSVGWAVTDTSYNLLRAKGKDMWGARLFEKANTAAERRTKRTSRRRSEREKARKAMLKELFADEINRVDPSFFIRLEESKFFLDDRSENNRQRYTLFNDATFTDKDYYEKYKTIFHLRSALINSDEKFDVRLVFLAILNLFSHRGHFLNASLKGDGDIQGMDVFYNDLVESCEYFEIELPRITNIDNFEKILSQKGKSRTKILEELSEELSISKKDKSKYNLIKLISGLEASVVELYNIEDIQDENKKIKIGFRESDYEESSLKVKEIIGDEYFDLVERAKSVHDMGLLSNIIGNSKYLCEARVEAYENHHKDLLKIKELLKKYDKKAYNDMFRKMTDKNYSAYVGSVNSNIAKERRSVDKRKIEDLYKYIEDTALKNIPDDNKDKIEILEKIKLGEFLKKQLTASNGVIPNQLQSRELRAILKKAENYLPFLKEKGEKNLTVSEMIIQLFEFQIPYYVGPLDKNPKKDNKANSWAKIKQGGRILPWNFEDKVDVKGSRKEFIEKMVRKCTYISDEHTLPKQSLLYEKFMVLNEINNIKIDGEKISVEAKQKIYNDLFVKGKKVSQKDIKKELISLNIMDKDSVLSGTDTVCNAYLSSIGKFTGVFKEEINKQSIVDMIEDIIFLKTVYGDEKRFVKEEIVEKYGDEIDKDKIKRILGFKFSNWGNLSKSFLELEGADVGTGEVRSIIQSLWETNFNLMELLSSRFTYMDELEKRVKKLEKPLSEWTIEDLDDMYLSSPVKRMIWQSMKIVDEIQTVIGYAPKRIFVEMTRSEGEKVRTKSRKDRLKELYNGIKEDSKQWVKELDSKDESYFRSKKMYLYYLQKGRCMYSGEVIELDKLMDDNLYDIDHIYPRSFVKDDSLDNLVLVKKEINNRKQNDPITPQIQASCQGFWKILHDQGFMSNEKYSRLTRKTQEFSDEEKLSFINRQIVETGQATKCMAQILQKSMGEDVDVVFSKARLVSEFRHKFELFKSRLINDFHHANDAYLNIVVGNSYFVKFTRNPANFIKDARKNPDNPVYKYHMDRFFERDVKSKSEVAWIGQSEGNSGTIVIVKKTMAKNSPLITKKVEEGHGSITKETIVGVKEIKFGRNKVEKADKTPKKPNLQAYRPIKTSDERLCNILRYGGRTSISISGYCLVEYVKKRKTIRSLEAIPVYLGRKDSLSEEKLLNYFRYNLNDGGKDSVSDIRLCLPFISTNSLVKIDGYLYYLGGKNDDRIQLYNAYQLKMKKEEVEYIRKIEKAVSMSKFDEIDREKNPVLTEEKNIELYNKIQDKFENTVFSKRMSLVKYNKKDLSFGDFLKNKKSKFEEIDLEKQCKVLYNIIFNLSNLKEVDLSDIGGSKSTGKCRCKKNITNYKEFKLIQQSITGLYSCEKDLMTI

SEQ ID NO: 318 - protein, 1364 aa, Peptoniphilus duerdenii
MKNLKEYYIGLDIGTASVGWAVTDESYNIPKFNGKKMWGVRLFDDAKTAEERRTQRGSRRRLNRRKERINLLQDLFATEISKVDPNFFLRLDNSDLYREDKDEKLKSKYTLFNDKDFKDRDYHKKYPTIHHLIMDLIEDEGKKDIRLLYLACHYLLKNRGHFIFEGQKFDTKNSFDKSINDLKIHLRDEYNIDLEFNNEDLIEIITDTTLNKTNKKKELKNIVGDTKFLKAISAIMIGSSQKLVDLFEDGEFEETTVKSVDFSTTAFDDKYSEYEEALGDTISLLNILKSIYDSSILENLLKDADKSKDGNKYISKAFVKKFNKHGKDLKTLKRIIKKYLPSEYANIFRNKSINDNYVAYTKSNITSNKRTKASKFTKQEDFYKFIKKHLDTIKETKLNSSENEDLKLIDEMLTDIEFKTFIPKLKSSDNGVIPYQLKLMELKKILDNQSKYYDFLNESDEYGTVKDKVESIMEFRIPYYVGPLNPDSKYAWIKRENTKITPWNFKDIVDLDSSREEFIDRLIGRCTYLKEEKVLPKASLIYNEFMVLNELNNLKLNEFLITEEMKKAIFEELFKTKKKVTLKAVSNLLKKEFNLTGDILLSGTDGDFKQGLNSYIDFKNIIGDKVDRDDYRIKIEEIIKLIVLYEDDKTYLKKKIKSAYKNDFTDDEIKKIAALNYKDWGRLSKRFLTGIEGVDKTTGEKGSIIYFMREYNLNLMELMSGHYTFTEEVEKLNPVENRELCYEMVDELYLSPSVKRMLWQSLRVVDEIKRIIGKDPKKIFIEMARAKEAKNSRKESRKNKLLEFYKFGKKAFINEIGEERYNYLLNEINSEEESKFRWDNLYLYYTQLGRCMYSLEPIDLADLKSNNIYDQDHIYPKSKIYDDSLENRVLVKKNLNHEKGNQYPIPEKVLNKNAYGFWKILFDKGLIGQKKYTRLTRRTPFEERELAEFIERQIVETRQATKETANLLKNICQDSEIVYSKAENASRFRQEFDIIKCRTVNDLHHMHDAYLNIVVGNVYNTKFTKNPLNFIKDKDNVRSYNLENMFKYDVVRGSYTAWIADDSEGNVKAATIKKVKRELEGKNYRFTRMSYIGTGGLYDQNLMRKGKGQIPQKENTNKSNIEKYGGYNKASSAYFALIESDGKAGRERTLETIPIMVYNQEKYGNTEAVDKYLKDNLELQDPKILKDKIKINSLIKLDGFLYNIKGKTGDSLSIAGSVQLIVNKEEQKLIKKMDKFLVKKKDNKDIKVTSFDNIKEEELIKLYKTLSDKLNNGIYSNKRNNQAKNISEALDKFKEISIEEKIDVLNQIILLFQSYNNGCNLKSIGLSAKTGVVFIPKKLNYKECKLINQSITGLFENEVDLLNL

SEQ ID NO: 319 - protein, 1358 aa, Acidaminococcus sp.
MGKMYYLGLDIGTNSVGYAVTDPSYHLLKFKGEPMWGAHVFAAGNQSAERRSFRTSRRRLDRRQQRVKLVQEIFAPVISPIDPRFFIRLHESALWRDDVAETDKHIFFNDPTYTDKEYYSDYPTIHHLIVDLMESSEKHDPRLVYLAVAWLVAHRGHFLNEVDKDNIGDVLSFDAFYPEFLAFLSDNGVSPWVCESKALQATLLSRNSVNDKYKALKSLIFGSQKPEDNFDANISEDGLIQLLAGKKVKVNKLFPQESNDASFTLNDKEDAIEEILGTLTPDECEWIAHIRRLFDWAIMKHALKDGRTISESKVKLYEQHHHDLTQLKYFVKTYLAKEYDDIFRNVDSETTKNYVAYSYHVKEVKGTLPKNKATQEEFCKYVLGKVKNIECSEADKVDFDEMIQRLTDNSFMPKQVSGENRVIPYQLYYYELKTILNKAASYLPFLTQCGKDAISNQDKLLSIMTFRIPYFVGPLRKDNSEHAWLERKAGKIYPWNFNDKVDLDKSEEAFIRRMTNTCTYYPGEDVLPLDSLIYEKFMILNEINNIRIDGYPISVDVKQQVFGLFEKKRRVTVKDIQNLLLSLGALDKHGKLTGIDTTIHSNYNTYHHFKSLMERGVLTRDDVERIVERMTYSDDTKRVRLWLNNNYGTLTADDVKHISRLRKHDFGRLSKMFLTGLKGVHKETGERASILDFMWNTNDNLMQLLSECYTFSDEITKLQEAYYAKAQLSLNDFLDSMYISNAVKRPIYRTLAVVNDIRKACGTAPKRIFIEMARDGESKKKRSVTRREQIKNLYRSIRKDFQQEVDFLEKILENKSDGQLQSDALYLYFAQLGRDMYTGDPIKLEHIKDQSFYNIDHIYPQSMVKDDSLDNKVLVQSEINGEKSSRYPLDAAIRNKMKPLWDAYYNHGLISLKKYQRLTRSTPFTDDEKWDFINRQLVETRQSTKALAILLKRKFPDTEIVYSKAGLSSDFRHEFGLVKSRNINDLHHAKDAFLAIVTGNVYHERFNRRWFMVNQPYSVKTKTLFTHSIKNGNFVAWNGEEDLGRIVKMLKQNKNTIHFTRFSFDRKEGLFDIQPLKASTGLVPRKAGLDVVKYGGYDKSTAAYYLLVRFTLEDKKTQHKLMMIPVEGLYKARIDHDKEFLTDYAQTTISEILQKDKQKVINIMFPMGTRHIKLNSMISIDGFYLSIGGKSSKGKSVLCHAMVPLIVPHKIECYIKAMESFARKFKENNKLRIVEKFDKITVEDNLNLYELFLQKLQHNPYNKFFSTQFDVLTNGRSTFTKLSPEEQVQTLLNILSIFKTCRSSGCDLKSINGSAQAARIMISADLTGLSKKYSDIRLVEQSASGLFVSKSQNLLEYL

SEQ ID NO: 320 - protein, 1356 aa, Lactobacillus farciminis
MTKKEQPYNIGLDIGTSSVGWAVTNDNYDLLNIKKKNLWGVRLFEEAQTAKETRLNRSTRRRYRRRKNRINWLNEIFSEELAKTDPSFLIRLQNSWVSKKDPDRKRDKYNLFIDGPYTDKEYYREFPTIFHLRKELILNKDKADIRLIYLALHNILKYRGNFTYEHQKFNISNLNNNLSKELIELNQQLIKYDISFPDDCDWNHISDILIGRGNATQKSSNILKDFTLDKETKKLLKEVINLILGNVAHLNTIFKTSLTKDEEKLNFSGKDIESKLDDLDSILDDDQFTVLDAANRIYSTITLNEILNGESYFSMAKVNQYENHAIDLCKLRDMWHTTKNEEAVEQSRQAYDDYINKPKYGTKELYTSLKKFLKVALPTNLAKEAEEKISKGTYLVKPRNSENGVVPYQLNKIEMEKIIDNQSQYYPFLKENKEKLLSILSFRIPYYVGPLQSAEKNPFAWMERKSNGHARPWNFDEIVDREKSSNKFIRRMTVTDSYLVGEPVLPKNSLIYQRYEVLNELNNIRITENLKTNPIGSRLTVETKQRIYNELFKKYKKVTVKKLTKWLIAQGYYKNPILIGLSQKDEFNSTLTTYLDMKKIFGSSFMEDNKNYDQIEELIEWLTIFEDKQILNEKLHSSKYSYTPDQIKKISNMRYKGWGRLSKKILMDITTETNTPQLLQLSNYSILDLMWATNNNFISIMSNDKYDFKNYIENHNLNKNEDQNISDLVNDIHVSPALKRGITQSIKIVQEIVKFMGHAPKHIFIEVTRETKKSEITTSREKRIKRLQSKLLNKANDFKPQLREYLVPNKKIQEELKKHKNDLSSERIMLYFLQNGKSLYSEESLNINKLSDYQVDHILPRTYIPDDSLENKALVLAKENQRKADDLLLNSNVIDRNLERWTYMLNNNMIGLKKFKNLTRRVITDKDKLGFIHRQLVQTSQMVKGVANILDNMYKNQGTTCIQARANLSTAFRKALSGQDDTYHFKHPELVKNRNVNDFHHAQDAYLASFLGTYRLRRFPTNEMLLMNGEYNKFYGQVKELYSKKKKLPDSRKNGFIISPLVNGTTQYDRNTGEIIWNVGFRDKILKIFNYHQCNVTRKTEIKTGQFYDQTIYSPKNPKYKKLIAQKKDMDPNIYGGFSGDNKSSITIVKIDNNKIKPVAIPIRLINDLKDKKTLQNWLEENVKHKKSIQIIKNNVPIGQIIYSKKVGLLSLNSDREVANRQQLILPPEHSALLRLLQIPDEDLDQILAFYDKNILVEILQELITKMKKFYPFYKGEREFLIANIENFNQATTSEKVNSLEELITLLHANSTSAHLIFNNIEKKAFGRKTHGLTLNNTDFIYQSVTGLYETRIHIE

SEQ ID NO: 321 - protein, 1421 aa, Streptococcus sanguinis
MTKFNKNYSIGLDIGVSSVGYAVVTEDYRVPAFKFKVLGNTEKEKIKKNLIGSTTFVSAQPAKGTRVFRVNRRRIDRRNHRITYLRDIFQKEIEKVDKNFYRRLDESFRVLGDKSEDLQIKQPFFGDKELETAYHKKYPTIYHLRKHLADADKNSPVADIREVYMAISHILKYRGHFLTLDKINPNNINMQNSWIDFIESCQEVFDLEISDESKNIADIFKSSENRQEKVKKILPYFQQELLKKDKSIFKQLLQLLFGLKTKFKDCFELEEEPDLNFSKENYDENLENFLGSLEEDFSDVFAKLKVLRDTILLSGMLTYTGATHARFSATMVERYEEHRKDLQRFKFFIKQNLSEQDYLDIFGRKTQNGFDVDKETKGYVGYITNKMVLTNPQKQKTIQQNFYDYISGKITGIEGAEYFLNKISDGTFLRKLRTSDNGAIPNQIHAYELEKIIERQGKDYPFLLENKDKLLSILTFKIPYYVGPLAKGSNSRFAWIKRATSSDILDDNDEDTRNGKIRPWNYQKLINMDETRDAFITNLIGNDIILLNEKVLPKRSLIYEEVMLQNELTRVKYKDKYGKAHFFDSELRQNIINGLFKNNSKRVNAKSLIKYLSDNHKDLNAIEIVSGVEKGKSFNSTLKTYNDLKTIFSEELLDSEIYQKELEEIIKVITVFDDKKSIKNYLTKFFGHLEILDEEKINQLSKLRYSGWGRYSAKLLLDIRDEDTGFNLLQFLRNDEENRNLTKLISDNTLSFEPKIKDIQSKSTIEDDIFDEIKKLAGSPAIKRGILNSIKIVDELVQIIGYPPHNIVIEMARENMTTEEGQKKAKTRKTKLESALKNIENSLLENGKVPHSDEQLQSEKLYLYYLQNGKDMYTLDKTGSPAPLYLDQLDQYEVDHIIPYSFLPIDSIDNKVLTHRENNQQKLNNIPDKETVANMKPFWEKLYNAKLISQTKYQRLTTSERTPDGVLTESMKAGFIERQLVETRQIIKHVARILDNRFSDTKIITLKSQLITNFRNTFHIAKIRELNDYHHAHDAYLAVVVGQTLLKVYPKLAPELIYGHHAHFNRHEENKATLRKHLYSNIMRFFNNPDSKVSKDIWDCNRDLPIIKDVIYNSQINFVKRTMIKKGAFYNQNPVGKFNKQLAANNRYPLKTKALCLDTSIYGGYGPMNSALSIIIIAERFNEKKGKIETVKEFHDIFIIDYEKFNNNPFQFLNDTSENGFLKKNNINRVLGFYRIPKYSLMQKIDGTRMLFESKSNLHKATQFKLTKTQNELFFHMKRLLTKSNLMDLKSKSAIKESQNFILKHKEEFDNISNQLSAFSQKMLGNTTSLKNLIKGYNERKIKEIDIRDETIKYFYDNFIKMFSFVKSGAPKDINDFFDNKCTVARMRPKPDKKLLNATLIHQSITGLYETRIDLSKLGED

SEQ ID NO: 322 - protein, 1338 aa, Coprococcus catus
MKQEYFLGLDMGTGSLGWAVTDSTYQVMRKHGKALWGTRLFESASTAEERRMFRTARRRLDRRNWRIQVLQEIFSEEISKVDPGFFLRMKESKYYPEDKRDAEGNCPELPYALFVDDNYTDKNYHKDYPTIYHLRKMLMETTEIPDIRLVYLVLHHMMKHRGHFLLSGDISQIKEFKSTFEQLIQNIQDEELEWHISLDDAAIQFVEHVLKDRNLTRSTKKSRLIKQLNAKSACEKAILNLLSGGTVKLSDIFNNKELDESERPKVSFADSGYDDYIGIVEAELAEQYYIIASAKAVYDWSVLVEILGNSVSISEAKIKVYQKHQADLKTLKKIVRQYMTKEDYKRVFVDTEEKLNNYSAYIGMTKKNGKKVDLKSKQCTQADFYDFLKKNVIKVIDHKEITQEIESEIEKENFLPKQVTKDNGVIPYQVHDYELKKILDNLGTRMPFIKENAEKIQQLFEFRIPYYVGPLNRVDDGKDGKFTWSVRKSDARIYPWNFTEVIDVEASAEKFIRRMTNKCTYLVGEDVLPKDSLVYSKFMVLNELNNLRLNGEKISVELKQRIYEELFCKYRKVTRKKLERYLVIEGIAKKGVEITGIDGDFKASLTAYHDFKERLTDVQLSQRAKEAIVLNVVLFGDDKKLLKQRLSKMYPNLTTGQLKGICSLSYQGWGRLSKTFLEEITVPAPGTGEVWNIMTALWQTNDNLMQLLSRNYGFTNEVEEFNTLKKETDLSYKTVDELYVSPAVKRQIWQTLKVVKEIQKVMGNAPKRVFVEMAREKQEGKRSDSRKKQLVELYRACKNEERDWITELNAQSDQQLRSDKLFLYYIQKGRCMYSGETIQLDELWDNTKYDIDHIYPQSKTMDDSLNNRVLVKKNYNAIKSDTYPLSLDIQKKMMSFWKMLQQQGFITKEKYVRLVRSDELSADELAGFIERQIVETRQSTKAVATILKEALPDTEIVYVKAGNVSNFRQTYELLKVREMNDLHHAKDAYLNIVVGNAYFVKFTKNAAWFIRNNPGRSYNLKRMFEFDIERSGEIAWKAGNKGSIVTVKKVMQKNNILVTRKAYEVKGGLFDQQIMKKGKGQVPIKGNDERLADIEKYGGYNKAAGTYFMLVKSLDKKGKEIRTIEFVPLYLKNQIEINHESAIQYLAQERGLNSPEILLSKIKIDTLFKVDGFKMWLSGRTGNQLIFKGANQLILSHQEAAILKGVVKYVNRKNENKDAKLSERDGMTEEKLLQLYDTFLDKLSNTVYSIRLSAQIKTLTEKRAKFIGLSNEDQCIVLNEILHMFQCQSGSANLKLIGGPGSAGILVMNNNITACKQISVINQSPTGIYEKEIDLIKL

SEQ ID NO: 323-325 - skipped (3 entries)

SEQ ID NO: 326 - protein, 1374 aa, Fusobacterium nucleatum
MKKQKFSDYYLGFDIGTNSVGWCVTDLDYNVLRFNKKDMWGSRLFDEAKTAAERRVQRNSRRRLKRRKWRLNLLEEIFSDEIMKIDSNFFRRLKESSLWLEDKNSKEKFTLFNDDNYKDYDFYKQYPTIFHLRDELIKNPEKKDIRLIYLALHSIFKSRGHFLFEGQNLKEIKNFETLYNNLISFLEDNGINKSIDKDNIEKLEKIICDSGKGLKDKEKEFKGIFNSDKQLVAIFKLSVGSSVSLNDLFDTDEYKKEEVEKEKISFREQIYEDDKPIYYSILGEKIELLDIAKSFYDFMVLNNILSDSNYISEAKVKLYEEHKKDLKNLKYIIRKYNKENYDKLFKDKNENNYPAYIGLNKEKDKKEVVEKSRLKIDDLIKVIKGYLPKPERIEEKDKTIFNEILNKIELKTILPKQRISDNGTLPYQIHEVELEKILENQSKYYDFLNYEENGVSTKDKLLKTFKFRIPYYVGPLNSYHKDKGGNSWIVRKEEGKILPWNFEQKVDIEKSAEEFIKRMTNKCTYLNGEDVIPKDSFLYSEYIILNELNKVQVNDEFLNEENKRKIIDELFKENKKVSEKKFKEYLLVNQIANRTVELKGIKDSFNSNYVSYIKFKDIFGEKLNLDIYKEISEKSILWKCLYGDDKKIFEKKIKNEYGDILNKDEIKKINSFKFNTWGRLSEKLLTGIEFINLETGECYSSVMEALRRTNYNLMELLSSKFTLQESIDNENKEMNEVSYRDLIEESYVSPSLKRAILQTLKIYEEIKKITGRVPKKVFIEMARGGDESMKNKKIPARQEQLKKLYDSCGNDIANFSIDIKEMKNSLSSYDNNSLRQKKLYLYYLQFGKCMYTGREIDLDRLLQNNDTYDIDHIYPRSKVIKDDSFDNLVLVLKNENAEKSNEYPVKKEIQEKMKSFWRFLKEKNFISDEKYKRLTGKDDFELRGFMARQLVNVRQTTKEVGKILQQIEPEIKIVYSKAEIASSFREMFDFIKVRELNDTHHAKDAYLNIVAGNVYNTKFTEKPYRYLQEIKENYDVKKIYNYDIKNAWDKENSLEIVKKNMEKNTVNITRFIKEEKGELFNLNPIKKGETSNEIISIKPKLYDGKDNKLNEKYGYYTSLKAAYFIYVEHEKKNKKVKTFERITRIDSTLIKNEKNLIKYLVSQKKLLNPKIIKKIYKEQTLIIDSYPYTFTGVDSNKKVELKNKKQLYLEKKYEQILKNALKFVEDNQGETEENYKFIYLKKRNNNEKNETIDAVKERYNIEFNEMYDKFLEKLSSKDYKNYINNKLYTNFLNSKEKFKKLKLWEKSLILREFLKIFNKNTYGKYEIKDSQTKEKLFSFPEDTGRIRLGQSSLGNNKELLEESVTGLFVKKIKL

SEQ ID NO: 327 - protein, 1333 aa, Planococcus antarcticus
MKNYTIGLDIGVASVGWVCIDENYKILNYNNRHAFGVHEFESAESAAGRRLKRGMRRRYNRRKKRLQLLQSLFDSYITDSGFFSKTDSQHFWKNNNEFENRSLTEVLSSLRISSRKYPTIYHLRSDLIESNKKMDLRLVYLALHNLVKYRGHFLQEGNWSEAASAEGMDDQLLELVTRYAELENLSPLDLSESQWKAAETLLLNRNLTKTDQSKELTAMFGKEYEPFCKLVAGLGVSLHQLFPSSEQALAYKETKTKVQLSNENVEEVMELLLEEESALLEAVQPFYQQVVLYELLKGETYVAKAKVSAFKQYQKDMASLKNLLDKTFGEKVYRSYFISDKNSQREYQKSHKVEVLCKLDQFNKEAKFAETFYKDLKKLLEDKSKTSIGTTEKDEMLRIIKAIDSNQFLQKQKGIQNAAIPHQNSLYEAEKILRNQQAHYPFITTEWIEKVKQILAFRIPYYIGPLVKDTTQSPFSWVERKGDAPITPWNFDEQIDKAASAEAFISRMRKTCTYLKGQEVLPKSSLTYERFEVLNELNGIQLRTTGAESDFRHRLSYEMKCWIIDNVFKQYKTVSTKRLLQELKKSPYADELYDEHTGEIKEVFGTQKENAFATSLSGYISMKSILGAVVDDNPAMTEELIYWIAVFEDREILHLKIQEKYPSITDVQRQKLALVKLPGWGRFSRLLIDGLPLDEQGQSVLDHMEQYSSVFMEVLKNKGFGLEKKIQKMNQHQVDGTKKIRYEDIEELAGSPALKRGIWRSVKIVEELVSIFGEPANIVLEVAREDGEKKRTKSRKDQWEELTKTTLKNDPDLKSFIGEIKSQGDQRFNEQRFWLYVTQQGKCLYTGKALDIQNLSMYEVDHILPQNFVKDDSLDNLALVMPEANQRKNQVGQNKMPLEIIEANQQYAMRTLWERLHELKLISSGKLGRLKKPSFDEVDKDKFIARQLVETRQIIKHVRDLLDERFSKSDIHLVKAGIVSKFRRFSEIPKIRDYNNKHHAMDALFAAALIQSILGKYGKNFLAFDLSKKDRQKQWRSVKGSNKEFFLFKNFGNLRLQSPVTGEEVSGVEYMKHVYFELPWQTTKMTQTGDGMFYKESIFSPKVKQAKYVSPKTEKFVHDEVKNHSICLVEFTFMKKEKEVQETKFIDLKVIEHHQFLKEPESQLAKFLAEKETNSPIIHARIIRTIPKYQKIWIEHFPYYFISTRELHNARQFEISYELMEKVKQLSERSSVEELKIVFGLLIDQMNDNYPIYTKSSIQDRVQKFVDTQLYDFKSFEIGFEELKKAVAANAQRSDTFGSRISKKPKPEEVAIGYESITGLKYRKPRSVVGTKR

SEQ ID NO: 328 - protein, 1395 aa, Treponema denticola
MKKEIKDYFLGLDVGTGSVGWAVTDTDYKLLKANRKDLWGMRCFETAETAEVRRLHRGARRRIERRKKRIKLLQELFSQEIAKTDEGFFQRMKESPFYAEDKTILQENTLFNDKDFADKTYHKAYPTINHLIKAWIENKVKPDPRLLYLACHNIIKKRGHFLFEGDFDSENQFDTSIQALFEYLREDMEVDIDADSQKVKEILKDSSLKNSEKQSRLNKILGLKPSDKQKKAITNLISGNKINFADLYDNPDLKDAEKNSISFSKDDFDALSDDLASILGDSFELLLKAKAVYNCSVLSKVIGDEQYLSFAKVKIYEKHKTDLTKLKNVIKKHFPKDYKKVFGYNKNEKNNNNYSGYVGVCKTKSKKLIINNSVNQEDFYKFLKTILSAKSEIKEVNDILTEIETGTFLPKQISKSNAEIPYQLRKMELEKILSNAEKHFSFLKQKDEKGLSHSEKIIMLLTFKIPYYIGPINDNHKKFFPDRCWVVKKEKSPSGKTTPWNFFDHIDKEKTAEAFITSRTNFCTYLVGESVLPKSSLLYSEYTVLNEINNLQIIIDGKNICDIKLKQKIYEDLFKKYKKITQKQISTFIKHEGICNKTDEVIILGIDKECTSSLKSYIELKNIFGKQVDEISTKNMLEEIIRWATIYDEGEGKTILKTKIKAEYGKYCSDEQIKKILNLKFSGWGRLSRKFLETVTSEMPGFSEPVNIITAMRETQNNLMELLSSEFTFTENIKKINSGFEDAEKQFSYDGLVKPLFLSPSVKKMLWQTLKLVKEISHITQAPPKKIFIEMAKGAELEPARTKTRLKILQDLYNNCKNDADAFSSEIKDLSGKIENEDNLRLRSDKLYLYYTQLGKCMYCGKPIEIGHVFDTSNYDIDHIYPQSKIKDDSISNRVLVCSSCNKNKEDKYPLKSEIQSKQRGFWNFLQRNNFISLEKLNRLTRATPISDDETAKFIARQLVETRQATKVAAKVLEKMFPETKIVYSKAETVSMFRNKFDIVKCREINDFHHAHDAYLNIVVGNVYNTKFTNNPWNFIKEKRDNPKIADTYNYYKVFDYDVKRNNITAWEKGKTIITVKDMLKRNTPIYTRQAACKKGELFNQTIMKKGLGQHPLKKEGPFSNISKYGGYNKVSAAYYTLIEYEEKGNKIRSLETIPLYLVKDIQKDQDVLKSYLTDLLGKKEFKILVPKIKINSLLKINGFPCHITGKTNDSFLLRPAVQFCCSNNEVLYFKKIIRFSEIRSQREKIGKTISPYEDLSFRSYIKENLWKKTKNDEIGEKEFYDLLQKKNLEIYDMLLTKHKDTIYKKRPNSATIDILVKGKEKFKSLIIENQFEVILEILKLFSATRNVSDLQHIGGSKYSGVAKIGNKISSLDNCILIYQSITGIFEKRIDLLKV

SEQ ID NO: 329 - protein, 1327 aa, Solobacterium moorei
MEGQMKNNGNNLQQGNYYLGLDVGTSSVGWAVTDTDYNVLKFRGKSMWGARLFDEASTAEERRTHRGNRRRLARRKYRLLLLEQLFEKEIRKIDDNFFVRLHESNLWADDKSKPSKFLLFNDTNFTDKDYLKKYPTIYHLRSDLIHNSTEHDIRLVFLALHHLIKYRGHFIYDNSANGDVKTLDEAVSDFEEYLNENDIEFNIENKKEFINVLSDKHLTKKEKKISLKKLYGDITDSENINISVLIEMLSGSSISLSNLFKDIEFDGKQNLSLDSDIEETLNDVVDILGDNIDLLIHAKEVYDIAVLTSSLGKHKYLCDAKVELFEKNKKDLMILKKYIKKNHPEDYKKIFSSPTEKKNYAAYSQTNSKNVCSQEEFCLFIKPYIRDMVKSENEDEVRIAKEVEDKSFLTKLKGTNNSVVPYQIHERELNQILKNIVAYLPFMNDEQEDISVVDKIKLIFKFKIPYYVGPLNTKSTRSWVYRSDEKIYPWNFSNVIDLDKTAHEFMNRLIGRCTYTNDPVLPMDSLLYSKYNVLNEINPIKVNGKAIPVEVKQAIYTDLFENSKKKVTRKSIYIYLLKNGYIEKEDIVSGIDIEIKSKLKSHHDFTQIVQENKCTPEEIERIIKGILVYSDDKSMLRRWLKNNIKGLSENDVKYLAKLNYKEWGRLSKTLLTDIYTINPEDGEACSILDIMWNTNATLMEILSNEKYQFKQNIENYKAENYDEKQNLHEELDDMYISPAARRSIWQALRIVDEIVDIKKSAPKKIFIEMAREKKSAMKKKRTESRKDTLLELYKSCKSQADGFYDEELFEKLSNESNSRLRRDQLYLYYTQMGRSMYTGKRIDFDKLINDKNTYDIDHIYPRSKIKDDSITNRVLVEKDINGEKTDIYPISEDIRQKMQPFWKILKEKGLINEEKYKRLTRNYELTDEELSSFVARQLVETQQSTKALATLLKKEYPSAKIVYSKAGNVSEFRNRKDKELPKFREINDLHHAKDAYLNIVVGNVYDTKFTEKFFNNIRNENYSLKRVFDFSVPGAWDAKGSTFNTIKKYMAKNNPIIAFAPYEVKGELFDQQIVPKGKGQFPIKQGKDIEKYGGYNKLSSAFLFAVEYKGKKARERSLETVYIKDVELYLQDPIKYCESVLGLKEPQIIKPKILMGSLFSINNKKLVVTGRSGKQYVCHHIYQLSINDEDSQYLKNIAKYLQEEPDGNIERQNILNITSVNNIKLFDVLCTKFNSNTYEIILNSLKNDVNEGREKFSELDILEQCNILLQLLKAFKCNRESSNLEKLNNKKQAGVIVIPHLFTKCSVFKVIHQSITGLFEKEMDLLK

SEQ ID NO: 330 - protein, 1334 aa, Staphylococcus pseudintermedius
MGRKPYILSLDIGTGSVGYACMDKGFNVLKYHDKDALGVYLFDGALTAQERRQFRTSRRRKNRRIKRLGLLQELLAPLVQNPNFYQFQRQFAWKNDNMDFKNKSLSEVLSFLGYESKKYPTIYHLQEALLLKDEKFDPELIYMALYHLVKYRGHFLFDHLKIENLTNNDNMHDFVELIETYENLNNIKLNLDYEKTKVIYEILKDNEMTKNDRAKRVKNMEKKLEQFSIMLLGLKFNEGKLFNHADNAEELKGANQSHTFADNYEENLTPFLTVEQSEFIERANKIYLSLTLQDILKGKKSMAMSKVAAYDKFRNELKQVKDIVYKADSTRTQFKKIFVSSKKSLKQYDATPNDQTFSSLCLFDQYLIRPKKQYSLLIKELKKIIPQDSELYFEAENDTLLKVLNTTDNASIPMQINLYEAETILRNQQKYHAEITDEMIEKVLSLIQFRIPYYVGPLVNDHTASKFGWMERKSNESIKPWNFDEVVDRSKSATQFIRRMTNKCSYLINEDVLPKNSLLYQEMEVLNELNATQIRLQTDPKNRKYRMMPQIKLFAVEHIFKKYKTVSHSKFLEIMLNSNHRENFMNHGEKLSIFGTQDDKKFASKLSSYQDMTKIFGDIEGKRAQIEEIIQWITIFEDKKILVQKLKECYPELTSKQINQLKKLNYSGWGRLSEKLLTHAYQGHSIIELLRHSDENFMEILTNDVYGFQNFIKEENQVQSNKIQHQDIANLTTSPALKKGIWSTIKLVRELTSIFGEPEKIIMEFATEDQQKGKKQKSRKQLWDDNIKKNKLKSVDEYKYIIDVANKLNNEQLQQEKLWLYLSQNGKCMYSGQSIDLDALLSPNATKHYEVDHIFPRSFIKDDSIDNKVLVIKKMNQTKGDQVPLQFIQQPYERIAYWKSLNKAGLISDSKLHKLMKPEFTAMDKEGFIQRQLVETRQISVHVRDFLKEEYPNTKVIPMKAKMVSEFRKKFDIPKIRQMNDAHHAIDAYLNGVVYHGAQLAYPNVDLFDFNFKWEKVREKWKALGEFNTKQKSRELFFFKKLEKMEVSQGERLISKIKLDMNHFKINYSRKLANIPQQFYNQTAVSPKTAELKYESNKSNEVVYKGLTPYQTYVVAIKSVNKKGKEKMEYQMIDHYVFDFYKFQNGNEKELALYLAQRENKDEVLDAQIVYSLNKGDLLYINNHPCYFVSRKEVINAKQFELTVEQQLSLYNVMNNKETNVEKLLIEYDFIAEKVINEYHHYLNSKLKEKRVRTFFSESNQTHEDFIKALDELFKVVTASATRSDKIGSRKNSMTHRAFLGKGKDVKIAYTSISGLKTTKPKSLFKLAESRNEL

SEQ ID NO: 331 - protein, 1472 aa, Flavobacterium branchiophilum
MAKILGLDLGTNSIGWAVVERENIDFSLIDKGVRIFSEGVKSEKGIESSRAAERTGYRSARKIKYRRKLRKYETLKVLSLNRMCPLSIEEVEEWKKSGFKDYPLNPEFLKWLSTDEESNVNPYFFRDRASKHKVSLFELGRAFYHIAQRRGFLSNRLDQSAEGILEEHCPKIEAIVEDLISIDEISTNITDYFFETGILDSNEKNGYAKDLDEGDKKLVSLYKSLLAILKKNESDFENCKSEIIERLNKKDVLGKVKGKIKDISQAMLDGNYKTLGQYFYSLYSKEKIRNQYTSREEHYLSEFITICKVQGIDQINEEEKINEKKFDGLAKDLYKAIFFQRPLKSQKGLIGKCSFEKSKSRCAISHPDFEEYRMWTYLNTIKIGTQSDKKLRFLTQDEKLKLVPKFYRKNDFNFDVLAKELIEKGSSFGFYKSSKKNDFFYWFNYKPTDTVAACQVAASLKNAIGEDWKTKSFKYQTINSNKEQVSRTVDYKDLWHLLTVATSDVYLYEFAIDKLGLDEKNAKAFSKTKLKKDFASLSLSAINKILPYLKEGLLYSHAVFVANIENIVDENIWKDEKQRDYIKTQISEIIENYTLEKSRFEIINGLLKEYKSENEDGKRVYYSKEAEQSFENDLKKKLVLFYKSNEIENKEQQETIFNELLPIFIQQLKDYEFIKIQRLDQKVLIFLKGKNETGQIFCTEEKGTAEEKEKKIKNRLKKLYHPSDIEKFKKKIIKDEFGNEKIVLGSPLTPSIKNPMAMRALHQLRKVLNALILEGQIDEKTIIHIEMARELNDANKRKGIQDYQNDNKKFREDAIKEIKKLYFEDCKKEVEPTEDDILRYQLWMEQNRSEIYEEGKNISICDIIGSNPAYDIEHTIPRSRSQDNSQMNKTLCSQRFNREVKKQSMPIELNNHLEILPRIAHWKEEADNLTREIEIISRSIKAAATKEIKDKKIRRRHYLTLKRDYLQGKYDRFIWEEPKVGFKNSQIPDTGIITKYAQAYLKSYFKKVESVKGGMVAEFRKIWGIQESFIDENGMKHYKVKDRSKHTHHTIDAITIACMTKEKYDVLAHAWTLEDQQNKKEARSIIEASKPWKTFKEDLLKIEEEILVSHYTPDNVKKQAKKIVRVRGKKQFVAEVERDVNGKAVPKKAASGKTIYKLDGEGKKLPRLQQGDTIRGSLHQDSIYGAIKNPLNTDEIKYVIRKDLESIKGSDVESIVDEVVKEKIKEAIANKVLLLSSNAQQKNKLVGTVWMNEEKRIAINKVRIYANSVKNPLHIKEHSLLSKSKHVHKQKVYGQNDENYAMAIYELDGKRDFELINIFNLAKLIKQGQGFYPLHKKKEIKGKIVFVPIEKRNKRDVVLKRGQQVVFYDKEVENPKDISEIVDFKGRIYIIEGLSIQRIVRPSGKVDEYGVIMLRYFKEARKADDIKQDNFKPDGVFKLGENKPTRKMNHQFTAFVEGIDFKVLPSGKFEKI

SEQ ID NO: 332 - protein, 1688 aa, Ignavibacterium album
MEFKKVLGLDIGTNSIGCALLSLPKSIQDYGKGGRLEWLTSRVIPLDADYMKAFIDGKNGLPQVITPAGKRRQKRGSRRLKHRYKLRRSRLIRVFKTLNWLPEDFPLDNPKRIKETISTEGKFSFRISDYVPISDESYREFYREFGYPENEIEQVIEEINFRRKTKGKNKNPMIKLLPEDWVVYYLRKKALIKPTTKEELIRIIYLFNQRRGFKSSRKDLTETAILDYDEFAKRLAEKEKYSAENYETKFVSITKVKEVVELKTDGRKGKKRFKVILEDSRIEPYEIERKEKPDWEGKEYTFLVTQKLEKGKFKQNKPDLPKEEDWALCTTALDNRMGSKHPGEFFFDELLKAFKEKRGYKIRQYPVNRWRYKKELEFIWTKQCQLNPELNNLNINKEILRKLATVLYPSQSKFFGPKIKEFENSDVLHIISEDIIYYQRDLKSQKSLISECRYEKRKGIDGEIYGLKCIPKSSPLYQEFRIWQDIHNIKVIRKESEVNGKKKINIDETQLYINENIKEKLFELFNSKDSLSEKDILELISLNIINSGIKISKKEEETTHRINLFANRKELKGNETKSRYRKVFKKLGFDGEYILNHPSKLNRLWHSDYSNDYADKEKTEKSILSSLGWKNRNGKWEKSKNYDVFNLPLEVAKAIANLPPLKKEYGSYSALAIRKMLVVMRDGKYWQHPDQIAKDQENTSLMLFDKNLIQLTNNQRKVLNKYLLTLAEVQKRSTLIKQKLNEIEHNPYKLELVSDQDLEKQVLKSFLEKKNESDYLKGLKTYQAGYLIYGKHSEKDVPIVNSPDELGEYIRKKLPNNSLRNPIVEQVIRETIFIVRDVWKSFGIIDEIHIELGRELKNNSEERKKTSESQEKNFQEKERARKLLKELLNSSNFEHYDENGNKIFSSFTVNPNPDSPLDIEKFRIWKNQSGLTDEELNKKLKDEKIPTEIEVKKYILWLTQKCRSPYTGKIIPLSKLFDSNVYEIEHIIPRSKMKNDSTNNLVICELGVNKAKGDRLAANFISESNGKCKFGEVEYTLLKYGDYLQYCKDTFKYQKAKYKNLLATEPPEDFIERQINDTRYIGRKLAELLTPVVKDSKNIIFTIGSITSELKITWGLNGVWKDILRPRFKRLESIINKKLIFQDEDDPNKYHFDLSINPQLDKEGLKRLDHRHHALDATIIAATTREHVRYLNSLNAADNDEEKREYFLSLCNHKIRDFKLPWENFTSEVKSKLLSCVVSYKESKPILSDPFNKYLKWEYKNGKWQKVFAIQIKNDRWKAVRRSMFKEPIGTVWIKKIKEVSLKEAIKIQAIWEEVKNDPVRKKKEKYIYDDYAQKVIAKIVQELGLSSSMRKQDDEKLNKFINEAKVSAGVNKNLNTTNKTIYNLEGRFYEKIKVAEYVLYKAKRMPLNKKEYIEKLSLQKMFNDLPNFILEKSILDNYPEILKELESDNKYIIEPHKKNNPVNRLLLEHILEYHNNPKEAFSTEGLEKLNKKAINKIGKPIKYITRLDGDINEEEIFRGAVFETDKGSNVYFVMYENNQTKDREFLKPNPSISVLKAIEHKNKIDFFAPNRLGFSRIILSPGDLVYVPTNDQYVLIKDNSSNETIINWDDNEFISNRIYQVKKFTGNSCYFLKNDIASLILSYSASNGVGEFGSQNISEYSVDDPPIRIKDVCIKIRVDRLGNVRPL

SEQ ID NO: 333 - protein, 1415 aa, Bergeyella zoohelcum
MKHILGLDLGTNSIGWALIERNIEEKYGKIIGMGSRIVPMGAELSKFEQGQAQTKNADRRTNRGARRLNKRYKQRRNKLIYILQKLDMLPSQIKLKEDFSDPNKIDKITILPISKKQEQLTAFDLVSLRVKALTEKVGLEDLGKIIYKYNQLRGYAGGSLEPEKEDIFDEEQSKDKKNKSFIAFSKIVFLGEPQEEIFKNKKLNRRAIIVETEEGNFEGSTFLENIKVGDSLELLINISASKSGDTITIKLPNKTNWRKKMENIENQLKEKSKEMGREFYISEFLLELLKENRWAKIRNNTILRARYESEFEAIWNEQVKHYPFLENLDKKTLIEIVSFIFPGEKESQKKYRELGLEKGLKYIIKNQVVFYQRELKDQSHLISDCRYEPNEKAIAKSHPVFQEYKVWEQINKLIVNTKIEAGTNRKGEKKYKYIDRPIPTALKEWIFEELQNKKEITFSAIFKKLKAEFDLREGIDFLNGMSPKDKLKGNETKLQLQKSLGELWDVLGLDSINRQIELWNILYNEKGNEYDLTSDRTSKVLEFINKYGNNIVDDNAEETAIRISKIKFARAYSSLSLKAVERILPLVRAGKYFNNDFSQQLQSKILKLLNENVEDPFAKAAQTYLDNNQSVLSEGGVGNSIATILVYDKHTAKEYSHDELYKSYKEINLLKQGDLRNPLVEQIINEALVLIRDIWKNYGIKPNEIRVELARDLKNSAKERATIHKRNKDNQTINNKIKETLVKNKKELSLANIEKVKLWEAQRHLSPYTGQPIPLSDLFDKEKYDVDHIIPISRYFDDSFTNKVISEKSVNQEKANRTAMEYFEVGSLKYSIFTKEQFIAHVNEYFSGVKRKNLLATSIPEDPVQRQIKDTQYIAIRVKEELNKIVGNENVKTTTGSITDYLRNHWGLTDKFKLLLKERYEALLESEKFLEAEYDNYKKDFDSRKKEYEEKEVLFEEQELTREEFIKEYKENYIRYKKNKLIIKGWSKRIDHRHHAIDALIVACTEPAHIKRLNDLNKVLQDWLVEHKSEFMPNFEGSNSELLEEILSLPENERTEIFTQIEKFRAIEMPWKGFPEQVEQKLKEIIISHKPKDKLLLQYNKAGDRQIKLRGQLHEGTLYGISQGKEAYRIPLTKFGGSKFATEKNIQKIVSPFLSGFIANHLKEYNNKKEEAFSAEGIMDLNNKLAQYRNEKGELKPHTPISTVKIYYKDPSKNKKKKDEEDLSLQKLDREKAFNEKLYVKTGDNYLFAVLEGEIKTKKTSQIKRLYDIISFFDATNFLKEEFRNAPDKKTFDKDLLFRQYFEERNKAKLLFTLKQGDFVYLPNENEEVILDKESPLYNQYWGDLKERGKNIYVVQKFSKKQIYFIKHTIADIIKKDVEFGSQNCYETVEGRSIKENCFKLEIDRLGNIVKVIKR

SEQ ID NO: 334 - protein, 1166 aa, Nitrobacter hamburgensis
MHVEIDFPHFSRGDSHLAMNKNEILRGSSVLYRLGLDLGSNSLGWFVTHLEKRGDRHEPVALGPGGVRIFPDGRDPQSGTSNAVDRRMARGARKRRDRFVERRKELIAALIKYNLLPDDARERRALEVLDPYALRKTALTDTLPAHHVGRALFHLNQRRGFQSNRKTDSKQSEDGAIKQAASRLATDKGNETLGVFFADMHLRKSYEDRQTAIRAELVRLGKDHLTGNARKKIWAKVRKRLFGDEVLPRADAPHGVRARATITGTKASYDYYPTRDMLRDEFNAIWAGQSAHHATITDEARTEIEHIIFYQRPLKPAIVGKCTLDPATRPFKEDPEGYRAPWSHPLAQRFRILSEARNLEIRDTGKGSRRLTKEQSDLVVAALLANREVKFDKLRTLLKLPAEARFNLESDRRAALDGDQTAARLSDKKGFNKAWRGFPPERQIAIVARLEETEDENELIAWLEKECALDGAAAARVANTTLPDGHCRLGLRAIKKIVPIMQDGLDEDGVAGAGYHIAAKRAGYDHAKLPTGEQLGRLPYYGQWLQDAVVGSGDARDQKEKQYGQFPNPTVHIGLGQLRRVVNDLIDKYGPPTEISIEFTRALKLSEQQKAERQREQRRNQDKNKARAEELAKFGRPANPRNLLKMRLWEELAHDPLDRKCVYTGEQISIERLLSDEVDIDHILPVAMTLDDSPANKIICMRYANRHKRKQTPSEAFGSSPTLQGHRYNWDDIAARATGLPRNKRWRFDANAREEFDKRGGFLARQLNETGWLARLAKQYLGAVTDPNQIWVVPGRLTSMLRGKWGLNGLLPSDNYAGVQDKAEEFLASTDDMEFSGVKNRADHRHHAIDGLVTALTDRSLLWKMANAYDEEHEKFVIEPPWPTMRDDLKAALEKMVVSHKPDHGIEGKLHEDSAYGFVKPLDATGLKEEEAGNLVYRKAIESLNENEVDRIRDIQLRTIVRDHVNVEKTKGVALADALRQLQAPSDDYPQFKHGLRHVRILKKEKGDYLVPIANRASGVAYKAYSAGENFCVEVFETAGGKWDGEAVRRFDANKKNAGPKIAHAPQWRDANEGAKLVMRIHKGDLIRLDHEGRARIMVVHRLDAAAGRFKLADHNETGNLDKRHATNNDIDPFRWLMASYNTLKKLAAVPVRVDELGRVWRVMPN

SEQ ID NO: 335 - protein, 1498 aa, Odoribacter laneus
METTLGIDLGTNSIGLALVDQEEHQILYSGVRIFPEGINKDTIGLGEKEESRNATRRAKRQMRRQYFRKKLRKAKLLELLIAYDMCPLKPEDVRRWKNWDKQQKSTVRQFPDTPAFREWLKQNPYELRKQAVTEDVTRPELGRILYQMIQRRGFLSSRKGKEEGKIFTGKDRMVGIDETRKNLQKQTLGAYLYDIAPKNGEKYRFRTERVRARYTLRDMYIREFEIIWQRQAGHLGLAHEQATRKKNIFLEGSATNVRNSKLITHLQAKYGRGHVLIEDTRITVTFQLPLKEVLGGKIEIEEEQLKFKSNESVLFWQRPLRSQKSLLSKCVFEGRNFYDPVHQKWIIAGPTPAPLSHPEFEEFRAYQFINNIIYGKNEHLTAIQREAVFELMCTESKDFNFEKIPKHLKLFEKFNFDDTTKVPACTTISQLRKLFPHPVWEEKREEIWHCFYFYDDNTLLFEKLQKDYALQTNDLEKIKKIRLSESYGNVSLKAIRRINPYLKKGYAYSTAVLLGGIRNSFGKRFEYFKEYEPEIEKAVCRILKEKNAEGEVIRKIKDYLVHNRFGFAKNDRAFQKLYHHSQAITTQAQKERLPETGNLRNPIVQQGLNELRRTVNKLLATCREKYGPSFKFDHIHVEMGRELRSSKTEREKQSRQIRENEKKNEAAKVKLAEYGLKAYRDNIQKYLLYKEIEEKGGTVCCPYTGKTLNISHTLGSDNSVQIEHIIPYSISLDDSLANKTLCDATFNREKGELTPYDFYQKDPSPEKWGASSWEEIEDRAFRLLPYAKAQRFIRRKPQESNEFISRQLNDTRYISKKAVEYLSAICSDVKAFPGQLTAELRHLWGLNNILQSAPDITFPLPVSATENHREYYVITNEQNEVIRLFPKQGETPRTEKGELLLTGEVERKVFRCKGMQEFQTDVSDGKYWRRIKLSSSVTWSPLFAPKPISADGQIVLKGRIEKGVFVCNQLKQKLKTGLPDGSYWISLPVISQTFKEGESVNNSKLTSQQVQLFGRVREGIFRCHNYQCPASGADGNFWCTLDTDTAQPAFTPIKNAPPGVGGGQIILTGDVDDKGIFHADDDLHYELPASLPKGKYYGIFTVESCDPTLIPIELSAPKTSKGENLIEGNIWVDEHTGEVRFDPKKNREDQRHHAIDAIVIALSSQSLFQRLSTYNARRENKKRGLDSTEHFPSPWPGFAQDVRQSVVPLLVSYKQNPKTLCKISKTLYKDGKKIHSCGNAVRGQLHKETVYGQRTAPGATEKSYHIRKDIRELKTSKHIGKVVDITIRQMLLKHLQENYHIDITQEFNIPSNAFFKEGVYRIFLPNKHGEPVPIKKIRMKEELGNAERLKDNINQYVNPRNNHHVMIYQDADGNLKEEIVSFWSVIERQNQGQPIYQLPREGRNIVSILQINDTFLIGLKEEEPEVYRNDLSTLSKHLYRVQKLSGMYYTFRHHLASTLNNEREEFRIQSLEAWKRANPVKVQIDEIGRITFLNGPLC

SEQ ID NO: 336 - protein, 1372 aa, Legionella pneumophila
MESSQILSPIGIDLGGKFTGVCLSHLEAFAELPNHANTKYSVILIDHNNFQLSQAQRRATRHRVRNKKRNQFVKRVALQLFQHILSRDLNAKEETALCHYLNNRGYTYVDTDLDEYIKDETTINLLKELLPSESEHNFIDWFLQKMQSSEFRKILVSKVEEKKDDKELKNAVKNIKNFITGFEKNSVEGHRHRKVYFENIKSDITKDNQLDSIKKKIPSVCLSNLLGHLSNLQWKNLHRYLAKNPKQFDEQTFGNEFLRMLKNFRHLKGSQESLAVRNLIQQLEQSQDYISILEKTPPEITIPPYEARTNTGMEKDQSLLLNPEKLNNLYPNWRNLIPGIIDAHPFLEKDLEHTKLRDRKRIISPSKQDEKRDSYILQRYLDLNKKIDKFKIKKQLSFLGQGKQLPANLIETQKEMETHFNSSLVSVLIQIASAYNKEREDAAQGIWFDNAFSLCELSNINPPRKQKILPLLVGAILSEDFINNKDKWAKFKIFWNTHKIGRTSLKSKCKEIEEARKNSGNAFKIDYEEALNHPEHSNNKALIKIIQTIPDIIQAIQSHLGHNDSQALIYHNPFSLSQLYTILETKRDGFHKNCVAVTCENYWRSQKTEIDPEISYASRLPADSVRPFDGVLARMMQRLAYEIAMAKWEQIKHIPDNSSLLIPIYLEQNRFEFEESFKKIKGSSSDKTLEQAIEKQNIQWEEKFQRIINASMNICPYKGASIGGQGEIDHIYPRSLSKKHFGVIFNSEVNLIYCSSQGNREKKEEHYLLEHLSPLYLKHQFGTDNVSDIKNFISQNVANIKKYISFHLLTPEQQKAARHALFLDYDDEAFKTITKFLMSQQKARVNGTQKFLGKQIMEFLSTLADSKQLQLEFSIKQITAEEVHDHRELLSKQEPKLVKSRQQSFPSHAIDATLTMSIGLKEFPQFSQELDNSWFINHLMPDEVHLNPVRSKEKYNKPNISSTPLFKDSLYAERFIPVWVKGETFAIGFSEKDLFEIKPSNKEKLFTLLKTYSTKNPGESLQELQAKSKAKWLYFPINKTLALEFLHHYFHKEIVTPDDTTVCHFINSLRYYTKKESITVKILKEPMPVLSVKFESSKKNVLGSFKHTIALPATKDWERLFNHPNFLALKANPAPNPKEFNEFIRKYFLSDNNPNSDIPNNGHNIKPQKHKAVRKVFSLPVIPGNAGTMMRIRRKDNKGQPLYQLQTIDDTPSMGIQINEDRLVKQEVLMDAYKTRNLSTIDGINNSEGQAYATFDNWLTLPVSTFKPEIIKLEMKPHSKTRRYIRITQSLADFIKTIDEALMIKPSDSIDDPLNMPNEIVCKNKLFGNELKPRDGKMKIVSTGKIVTYEFESDSTPQWIQTLYVTQLKKQP

SEQ ID NO: 337 - protein, 1517 aa, Bacteroides sp.
MKKIVGLDLGTNSIGWALINAYINKEHLYGIEACGSRIIPMDAAILGNFDKGNSISQTADRTSYRGIRRLRERHLLRRERLHRILDLLGFLPKHYSDSLNRYGKFLNDIECKLPWVKDETGSYKFIFQESFKEMLANFTEHHPILIANNKKVPYDWTIYYLRKKALTQKISKEELAWILLNFNQKRGYYQLRGEEEETPNKLVEYYSLKVEKVEDSGERKGKDTWYNVHLENGMIYRRTSNIPLDWEGKTKEFIVTTDLEADGSPKKDKEGNIKRSFRAPKDDDWTLIKKKTEADIDKIKMTVGAYIYDTLLQKPDQKIRGKLVRTIERKYYKNELYQILKTQSEFHEELRDKQLYIACLNELYPNNEPRRNSISTRDFCHLFIEDIIFYQRPLKSKKSLIDNCPYEENRYIDKESGEIKHASIKCIAKSHPLYQEFRLWQFIVNLRIYRKETDVDVTQELLPTEADYVTLFEWLNEKKEIDQKAFFKYPPFGFKKTTSNYRWNYVEDKPYPCNETHAQIIARLGKAHIPKAFLSKEKEETLWHILYSIEDKQEIEKALHSFANKNNLSEEFIEQFKNFPPFKKEYGSYSAKAIKKLLPLMRMGKYWSIENIDNGTRIRINKIIDGEYDENIRERVRQKAINLTDITHFRALPLWLACYLVYDRHSEVKDIVKWKTPKDIDLYLKSFKQHSLRNPIVEQVITETLRTVRDIWQQVGHIDEIHIELGREMKNPADKRARMSQQMIKNENTNLRIKALLTEFLNPEFGIENVRPYSPSQQDLLRIYEEGVLNSILELPEDIGIILGKFNQTDTLKRPTRSEILRYKLWLEQKYRSPYTGEMIPLSKLFTPAYEIEHIIPQSRYFDDSLSNKVICESEINKLKDRSLGYEFIKNHHGEKVELAFDKPVEVLSVEAYEKLVHESYSHNRSKMKKLLMEDIPDQFIERQLNDSRYISKVVKSLLSNIVREENEQEAISKNVIPCTGGITDRLKKDWGINDVWNKIVLPRFIRLNELTESTRFTSINTNNTMIPSMPLELQKGFNKKRIDHRHHAMDAIIIACANRNIVNYLNNVSASKNTKITRRDLQTLLCHKDKTDNNGNYKWVIDKPWETFTQDTLTALQKITVSFKQNLRVINKTTNHYQHYENGKKIVSNQSKGDSWAIRKSMHKETVHGEVNLRMIKTVSFNEALKKPQAIVEMDLKKKILAMLELGYDTKRIKNYFEENKDTWQDINPSKIKVYYFTKETKDRYFAVRKPIDTSFDKKKIKESITDTGIQQIMLRHLETKDNDPTLAFSPDGIDEMNRNILILNKGKKHQPIYKVRVYEKAEKFTVGQKGNKRTKFVEAAKGTNLFFAIYETEEIDKDTKKVIRKRSYSTIPLNVVIERQKQGLSSAPEDENGNLPKYILSPNDLVYVPTQEEINKGEVVMPIDRDRIYKMVDSSGITANFIPASTANLIFALPKATAEIYCNGENCIQNEYGIGSPQSKNQKAITGEMVKEICFPIKVDRLGNIIQVGSCILTN

SEQ ID NO: 338 - protein, 1101 aa, Akkermansia muciniphila
MSRSLTFSFDIGYASIGWAVIASASHDDADPSVCGCGTVLFPKDDCQAFKRREYRRLRRNIRSRRVRIERIGRLLVQAQIITPEMKETSGHPAPFYLASEALKGHRTLAPIELWHVLRWYAHNRGYDNNASWSNSLSEDGGNGEDTERVKHAQDLMDKHGTATMAETICRELKLEEGKADAPMEVSTPAYKNLNTAFPRLIVEKEVRRILELSAPLIPGLTAEIIELIAQHHPLTTEQRGVLLQHGIKLARRYRGSLLFGQLIPRFDNRIISRCPVTWAQVYEAELKKGNSEQSARERAEKLSKVPTANCPEFYEYRMARILCNIRADGEPLSAEIRRELMNQARQEGKLTKASLEKAISSRLGKETETNVSNYFTLHPDSEEALYLNPAVEVLQRSGIGQILSPSVYRIAANRLRRGKSVTPNYLLNLLKSRGESGEALEKKIEKESKKKEADYADTPLKPKYATGRAPYARTVLKKVVEEILDGEDPTRPARGEAHPDGELKAHDGCLYCLLDTDSSVNQHQKERRLDTMTNNHLVRHRMLILDRLLKDLIQDFADGQKDRISRVCVEVGKELTTFSAMDSKKIQRELTLRQKSHTDAVNRLKRKLPGKALSANLIRKCRIAMDMNWTCPFTGATYGDHELENLELEHIVPHSFRQSNALSSLVLTWPGVNRMKGQRTGYDFVEQEQENPVPDKPNLHICSLNNYRELVEKLDDKKGHEDDRRRKKKRKALLMVRGLSHKHQSQNHEAMKEIGMTEGMMTQSSHLMKLACKSIKTSLPDAHIDMIPGAVTAEVRKAWDVFGVFKELCPEAADPDSGKILKENLRSLTHLHHALDACVLGLIPYIIPAHHNGLLRRVLAMRRIPEKLIPQVRPVANQRHYVLNDDGRMMLRDLSASLKENIREQLMEQRVIQHVPADMGGALLKETMQRVLSVDGSGEDAMVSLSKKKDGKKEKNQVKASKLVGVFPEGPSKLKALKAAIEIDGNYGVALDPKPVVIRHIKVFKRIMALKEQNGGKPVRILKKGMLIHLTSSKDPKHAGVWRIESIQDSKGGVKLDLQRAHCAVPKNKTHECNWREVDLISLLKKYQMKRYPTSYTGTPR

SEQ ID NO: 339 - protein, 1424 aa, Prevotella sp.
MTQKVLGLDLGTNSIGSAVRNLDLSDDLQWQLEFFSSDIFRSSVNKESNGREYSLAAQRSAHRRSRGLNEVRRRRLWATLNLLIKHGFCPMSSESLMRWCTYDKRKGLFREYPIDDKDFNAWILLDFNGDGRPDYSSPYQLRRELVTRQFDFEQPIERYKLGRALYHIAQHRGFKSSKGETLSQQETNSKPSSTDEIPDVAGAMKASEEKLSKGLSTYMKEHNLLTVGAAFAQLEDEGVRVRNNNDYRAIRSQFQHEIETIFKFQQGLSVESELYERLISEKKNVGTIFYKRPLRSQRGNVGKCTLERSKPRCAIGHPLFEKFRAWTLINNIKVRMSVDTLDEQLPMKLRLDLYNECFLAFVRTEFKFEDIRKYLEKRLGIHFSYNDKTINYKDSTSVAGCPITARFRKMLGEEWESFRVEGQKERQAHSKNNISFHRVSYSIEDIWHFCYDAEEPEAVLAFAQETLRLERKKAEELVRIWSAMPQGYAMLSQKAIRNINKILMLGLKYSDAVILAKVPELVDVSDEELLSIAKDYYLVEAQVNYDKRINSIVNGLIAKYKSVSEEYRFADHNYEYLLDESDEKDIIRQIENSLGARRWSLMDANEQTDILQKVRDRYQDFFRSHERKFVESPKLGESFENYLTKKFPMVEREQWKKLYHPSQITIYRPVSVGKDRSVLRLGNPDIGAIKNPTVLRVLNTLRRRVNQLLDDGVISPDETRVVVETARELNDANRKWALDTYNRIRHDENEKIKKILEEFYPKRDGISTDDIDKARYVIDQREVDYFTGSKTYNKDIKKYKFWLEQGGQCMYTGRTINLSNLFDPNAFDIEHTIPESLSFDSSDMNLTLCDAHYNRFIKKNHIPTDMPNYDKAITIDGKEYPAITSQLQRWVERVERLNRNVEYWKGQARRAQNKDRKDQCMREMHLWKMELEYWKKKLERFTVTEVTDGFKNSQLVDTRVITRHAVLYLKSIFPHVDVQRGDVTAKFRKILGIQSVDEKKDRSLHSHHAIDATTLTIIPVSAKRDRMLELFAKIEEINKMLSFSGSEDRTGLIQELEGLKNKLQMEVKVCRIGHNVSEIGTFINDNIIVNHHIKNQALTPVRRRLRKKGYIVGGVDNPRWQTGDALRGEIHKASYYGAITQFAKDDEGKVLMKEGRPQVNPTIKFVIRRELKYKKSAADSGFASWDDLGKAIVDKELFALMKGQFPAETSFKDACEQGIYMIKKGKNGMPDIKLHHIRHVRCEAPQSGLKIKEQTYKSEKEYKRYFYAAVGDLYAMCCYTNGKIREFRIYSLYDVSCHRKSDIEDIPEFITDKKGNRLMLDYKLRTGDMILLYKDNPAELYDLDNVNLSRRLYKINRFESQSNLVLMTHHLSTSKERGRSLGKTVDYQNLPESIRSSVKSLNFLIMGENRDFVIKNGKIIFNHR

SEQ ID NO: 340 - protein, 1409 aa, Wolinella succinogenes
MLVSPISVDLGGKNTGFFSFTDSLDNSQSGTVIYDESFVLSQVGRRSKRHSKRNNLRNKLVKRLFLLILQEHHGLSIDVLPDEIRGLFNKRGYTYAGFELDEKKKDALESDTLKEFLSEKLQSIDRDSDVEDFLNQIASNAESFKDYKKGFEAVFASATHSPNKKLELKDELKSEYGENAKELLAGLRVTKEILDEFDKQENQGNLPRAKYFEELGEYIATNEKVKSFFDSNSLKLTDMTKLIGNISNYQLKELRRYFNDKEMEKGDIWIPNKLHKITERFVRSWHPKNDADRQRRAELMKDLKSKEIMELLTTTEPVMTIPPYDDMNNRGAVKCQTLRLNEEYLDKHLPNWRDIAKRLNHGKFNDDLADSTVKGYSEDSTLLHRLLDTSKEIDIYELRGKKPNELLVKTLGQSDANRLYGFAQNYYELIRQKVRAGIWVPVKNKDDSLNLEDNSNMLKRCNHNPPHKKNQIHNLVAGILGVKLDEAKFAEFEKELWSAKVGNKKLSAYCKNIEELRKTHGNTFKIDIEELRKKDPAELSKEEKAKLRLTDDVILNEWSQKIANFFDIDDKHRQRFNNLFSMAQLHTVIDTPRSGFSSTCKRCTAENRFRSETAFYNDETGEFHKKATATCQRLPADTQRPFSGKIERYIDKLGYELAKIKAKELEGMEAKEIKVPIILEQNAFEYEESLRKSKTGSNDRVINSKKDRDGKKLAKAKENAEDRLKDKDKRIKAFSSGICPYCGDTIGDDGEIDHILPRSHTLKIYGTVFNPEGNLIYVHQKCNQAKADSIYKLSDIKAGVSAQWIEEQVANIKGYKTFSVLSAEQQKAFRYALFLQNDNEAYKKVVDWLRTDQSARVNGTQKYLAKKIQEKLTKMLPNKHLSFEFILADATEVSELRRQYARQNPLLAKAEKQAPSSHAIDAVMAFVARYQKVFKDGTPPNADEVAKLAMLDSWNPASNEPLTKGLSTNQKIEKMIKSGDYGQKNMREVFGKSIFGENAIGERYKPIVVQEGGYYIGYPATVKKGYELKNCKVVTSKNDIAKLEKIIKNQDLISLKENQYIKIFSINKQTISELSNRYFNMNYKNLVERDKEIVGLLEFIVENCRYYTKKVDVKFAPKYIHETKYPFYDDWRRFDEAWRYLQENQNKTSSKDRFVIDKSSLNEYYQPDKNEYKLDVDTQPIWDDFCRWYFLDRYKTANDKKSIRIKARKTFSLLAESGVQGKVFRAKRKIPTGYAYQALPMDNNVIAGDYANILLEANSKTLSLVPKSGISIEKQLDKKLDVIKKTDVRGLAIDNNSFFNADFDTHGIRLIVENTSVKVGNFPISAIDKSAKRMIFRALFEKEKGKRKKKTTISFKESGPVQDYLKVFLKKIVKIQLRTDGSISNIVVRKNAADFTLSFRSEHIQKLLK

SEQ ID NO: 341 - protein, 1146 aa, Alicyclobacillus hesperidum
MAYRLGLDIGITSVGWAVVALEKDESGLKPVRIQDLGVRIFDKAEDSKTGASLALPRREARSARRRTRRRRHRLWRVKRLLEQHGILSMEQIEALYAQRTSSPDVYALRVAGLDRCLIAEEIARVLIHIAHRRGFQSNRKSEIKDSDAGKLLKAVQENENLMQSKGYRTVAEMLVSEATKTDAEGKLVHGKKHGYVSNVRNKAGEYRHTVSRQAIVDEVRKIFAAQRALGNDVMSEELEDSYLKILCSQRNFDDGPGGDSPYGHGSVSPDGVRQSIYERMVGSCTFETGEKRAPRSSYSFERFQLLTKVVNLRIYRQQEDGGRYPCELTQTERARVIDCAYEQTKITYGKLRKLLDMKDTESFAGLTYGLNRSRNKTEDTVFVEMKFYHEVRKALQRAGVFIQDLSIETLDQIGWILSVWKSDDNRRKKLSTLGLSDNVIEELLPLNGSKFGHLSLKAIRKILPFLEDGYSYDVACELAGYQFQGKTEYVKQRLLPPLGEGEVTNPVVRRALSQAIKVVNAVIRKHGSPESIHIELARELSKNLDERRKIEKAQKENQKNNEQIKDEIREILGSAHVTGRDIVKYKLFKQQQEFCMYSGEKLDVTRLFEPGYAEVDHIIPYGISFDDSYDNKVLVKTEQNRQKGNRTPLEYLRDKPEQKAKFIALVESIPLSQKKKNHLLMDKRAIDLEQEGFRERNLSDTRYITRALMNHIQAWLLFDETASTRSKRVVCVNGAVTAYMRARWGLTKDRDAGDKHHAADAVVVACIGDSLIQRVTKYDKFKRNALADRNRYVQQVSKSEGITQYVDKETGEVFTWESFDERKFLPNEPLEPWPFFRDELLARLSDDPSKNIRAIGLLTYSETEQIDPIFVSRMPTRKVTGAAHKETIRSPRIVKVDDNKGTEIQVVVSKVALTELKLTKDGEIKDYFRPEDDPRLYNTLRERLVQFGGDAKAAFKEPVYKISKDGSVRTPVRKVKIQEKLTLGVPVHGGRGIAENGGMVRIDVFAKGGKYYFVPIYVADVLKRELPNRLATAHKPYSEWRVVDDSYQFKFSLYPNDAVMIKPSREVDITYKDRKEPVGCRIMYFVSANIASASISLRTHDNSGELEGLGIQGLEVFEKYVVGPLGDTHPVYKERRMPFRVERKMN

SEQ ID NO: 342 - protein, 1442 aa, Caenispirillum sp.
MPVLSPLSPNAAQGRRRWSLALDIGEGSIGWAVAEVDAEGRVLQLTGTGVTLFPSAWSNENGTYVAHGAADRAVRGQQQRHDSRRRRLAGLARLCAPVLERSPEDLKDLTRTPPKADPRAIFFLRADAARRPLDGPELFRVLHHMAAHRGIRLAELQEVDPPPESDADDAAPAATEDEDGTRRAAADERAFRRLMAEHMHRHGTQPTCGEIMAGRLRETPAGAQPVTRARDGLRVGGGVAVPTRALIEQEFDAIRAIQAPRHPDLPWDSLRRLVLDQAPIAVPPATPCLFLEELRRRGETFQGRTITREAIDRGLTVDPLIQALRIRETVGNLRLHERITEPDGRQRYVPRAMPELGLSHGELTAPERDTLVRALMHDPDGLAAKDGRIPYTRLRKLIGYDNSPVCFAQERDTSGGGITVNPTDPLMARWIDGWVDLPLKARSLYVRDVVARGADSAALARLLAEGAHGVPPVAAAAVPAATAAILESDIMQPGRYSVCPWAAEAILDAWANAPTEGFYDVTRGLFGFAPGEIVLEDLRRARGALLAHLPRTMAAARTPNRAAQQRGPLPAYESVIPSQLITSLRRAHKGRAADWSAADPEERNPFLRTWTGNAATDHILNQVRKTANEVITKYGNRRGWDPLPSRITVELAREAKHGVIRRNEIAKENRENEGRRKKESAALDTFCQDNTVSWQAGGLPKERAALRLRLAQRQEFFCPYCAERPKLRATDLFSPAETEIDHVIERRMGGDGPDNLVLAHKDCNNAKGKKTPHEHAGDLLDSPALAALWQGWRKENADRLKGKGHKARTPREDKDFMDRVGWRFEEDARAKAEENQERRGRRMLHDTARATRLARLYLAAAVMPEDPAEIGAPPVETPPSPEDPTGYTAIYRTISRVQPVNGSVTHMLRQRLLQRDKNRDYQTHHAEDACLLLLAGPAVVQAFNTEAAQHGADAPDDRPVDLMPTSDAYHQQRRARALGRVPLATVDAALADIVMPESDRQDPETGRVHWRLTRAGRGLKRRIDDLTRNCVILSRPRRPSETGTPGALHNATHYGRREITVDGRTDTVVTQRMNARDLVALLDNAKIVPAARLDAAAPGDTILKEICTEIADRHDRVVDPEGTHARRWISARLAALVPAHAEAVARDIAELADLDALADADRTPEQEARRSALRQSPYLGRAISAKKADGRARAREQEILTRALLDPHWGPRGLRHLIMREARAPSLVRIRANKTDAFGRPVPDAAVWVKTDGNAVSQLWRLTSVVTDDGRRIPLPKPIEKRIEISNLEYARLNGLDEGAGVTGNNAPPRPLRQDIDRLTPLWRDHGTAPGGYLGTAVGELEDKARSALRGKAMRQTLTDAGITAEAGWRLDSEGAVCDLEVAKGDTVKKDGKTYKVGVITQGIFGMPVDAAGSAPRTPEDCEKFEEQYGIKPWKAKGIPLA

SEQ ID NO: 343 - protein, 1114 aa, Eubacterium rectale
MNYTEKEKLFMKYILALDIGIASVGWAILDKESETVIEAGSNIFPEASAADNQLRRDMRGAKRNNRRLKTRINDFIKLWENNNLSIPQFKSTEIVGLKVRAITEEITLDELYLILYSYLKHRGISYLEDALDDTVSGSSAYANGLKLNAKELETHYPCEIQQERLNTIGKYRGQSQIINENGEVLDLSNVFTIGAYRKEIQRVFEIQKKYHPELTDEFCDGYMLIFNRKRKYYEGPGNEKSRTDYGRFTTKLDANGNYITEDNIFEKLIGKCSVYPDELRAAAASYTAQEYNVLNDLNNLTINGRKLEENEKHEIVERIKSSNTINMRKIISDCMGENIDDFAGARIDKSGKEIFHKFEVYNKMRKALLEIGIDISNYSREELDEIGYIMTINTDKEAMMEAFQKSWIDLSDDVKQCLINMRKTNGALFNKWQSFSLKIMNELIPEMYAQPKEQMTLLTEMGVTKGTQEEFAGLKYIPVDVVSEDIFNPVVRRSVRISFKILNAVLKKYKALDTIVIEMPRDRNSEEQKKRINDSQKLNEKEMEYIEKKLAVTYGIKLSPSDFSSQKQLSLKLKLWNEQDGICLYSGKTIDPNDIINNPQLFEIDHIIPRSISFDDARSNKVLVYRSENQKKGNQTPYYYLTHSHSEWSFEQYKATVMNLSKKKEYAISRKKIQNLLYSEDITKMDVLKGFINRNINDTSYASRLVLNTIQNFFMANEADTKVKVIKGSYTHQMRCNLKLDKNRDESYSHHAVDAMLIGYSELGYEAYHKLQGEFIDFETGEILRKDMWDENMSDEVYADYLYGKKWANIRNEVVKAEKNVKYWHYVMRKSNRGLCNQTIRGTREYDGKQYKINKLDIRTKEGIKVFAKLAFSKKDSDRERLLVYLNDRRTFDDLCKIYEDYSDAANPFVQYEKETGDIIRKYSKKHNGPRIDKLKYKDGEVGACIDISHKYGFEKGSKKVILESLVPYRMDVYYKEENHSYYLVGVKQSDIKFEKGRNVIDEEAYARILVNEKMIQPGQSRADLENLGFKFKLSFYKNDIIEYEKDGKIYTERLVSRTMPKQRNYIETKPIDKAKFEKQNLVGLGKTKFIKKYRYDILGNKYSCSEEKFTSFC

SEQ ID NO: 344 - protein, 1314 aa, Mycoplasma synoviae
MLRLYCANNLVLNNVQNLWKYLLLLIFDKKIIFLFKIKVILIRRYMENNNKEKIVIGFDLGVASVGWSIVNAETKEVIDLGVRLFSEPEKADYRRAKRTTRRLLRRKKFKREKFHKLILKNAEIFGLQSRNEILNVYKDQSSKYRNILKLKINALKEEIKPSELVWILRDYLQNRGYFYKNEKLTDEFVSNSFPSKKLHEHYEKYGFFRGSVKLDNKLDNKKDKAKEKDEEEESDAKKESEELIFSNKQWINEIVKVFENQSYLTESFKEEYLKLFNYVRPFNKGPGSKNSRTAYGVFSTDIDPETNKFKDYSNIWDKTIGKCSLFEEEIRAPKNLPSALIFNLQNEICTIKNEFTEFKNWWLNAEQKSEILKFVFTELFNWKDKKYSDKKFNKNLQDKIKKYLLNFALENFNLNEEILKNRDLENDTVLGLKGVKYYEKSNATADAALEFSSLKPLYVFIKFLKEKKLDLNYLLGLENTEILYFLDSIYLAISYSSDLKERNEWFKKLLKELYPKIKNNNLEIIENVEDIFEITDQEKFESFSKTHSLSREAFNHIIPLLLSNNEGKNYESLKHSNEELKKRTEKAELKAQQNQKYLKDNFLKEALVPLSVKTSVLQAIKIFNQIIKNFGKKYEISQVVIEMARELTKPNLEKLLNNATNSNIKILKEKLDQTEKFDDFTKKKFIDKIENSVVFRNKLFLWFEQDRKDPYTQLDIKINEIEDETEIDHVIPYSKSADDSWFNKLLVKKSTNQLKKNKTVWEYYQNESDPEAKWNKFVAWAKRIYLVQKSDKESKDNSEKNSIFKNKKPNLKFKNITKKLFDPYKDLGFLARNLNDTRYATKVFRDQLNNYSKHHSKDDENKLFKVVCMNGSITSFLRKSMWRKNEEQVYRFNFWKKDRDQFFHHAVDASIIAIFSLLTKTLYNKLRVYESYDVQRREDGVYLINKETGEVKKADKDYWKDQHNFLKIRENAIEIKNVLNNVDFQNQVRYSRKANTKLNTQLFNETLYGVKEFENNFYKLEKVNLFSRKDLRKFILEDLNEESEKNKKNENGSRKRILTEKYIVDEILQILENEEFKDSKSDINALNKYMDSLPSKFSEFFSQDFINKCKKENSLILTFDAIKHNDPKKVIKIKNLKFFREDATLKNKQAVHKDSKNQIKSFYESYKCVGFIWLKNKNDLEESIFVPINSRVIHFGDKDKDIFDFDSYNKEKLLNEINLKRPENKKFNSINEIEFVKFVKPGALLLNFENQQIYYISTLESSSLRAKIKLLNKMDKGKAVSMKKITNPDEYKIIEHVNPLGINLNWTKKLENNN

SEQ ID NO: 345 - protein, 1197 aa, Porphyromonas sp.
MLMSKHVLGLDLGVGSIGWCLIALDAQGDPAEILGMGSRVVPLNNATKAIEAFNAGAAFTASQERTARRTMRRGFARYQLRRYRLRRELEKVGMLPDAALIQLPLLELWELRERAATAGRRLTLPELGRVLCHINQKRGYRHVKSDAAAIVGDEGEKKKDSNSAYLAGIRANDEKLQAEHKTVGQYFAEQLRQNQSESPTGGISYRIKDQIFSRQCYIDEYDQIMAVQRVHYPDILTDEFIRMLRDEVIFMQRPLKSCKHLVSLCEFEKQERVMRVQQDDGKGGWQLVERRVKFGPKVAPKSSPLFQLCCIYEAVNNIRLTRPNGSPCDITPEERAKIVAHLQSSASLSFAALKKLLKEKALIADQLTSKSGLKGNSTRVALASALQPYPQYHHLLDMELETRMMTVQLTDEETGEVTEREVAVVTDSYVRKPLYRLWHILYSIEEREAMRRALITQLGMKEEDLDGGLLDQLYRLDFVKPGYGNKSAKFICKLLPQLQQGLGYSEACAAVGYRHSNSPTSEEITERTLLEKIPLLQRNELRQPLVEKILNQMINLVNALKAEYGIDEVRVELARELKMSREERERMARNNKDREERNKGVAAKIRECGLYPTKPRIQKYMLWKEAGRQCLYCGRSIEEEQCLREGGMEVEHIIPKSVLYDDSYGNKTCACRRCNKEKGNRTALEYIRAKGREAEYMKRINDLLKEKKISYSKHQRLRWLKEDIPSDFLERQLRLTQYISRQAMAILQQGIRRVSASEGGVTARLRSLWGYGKILHTLNLDRYDSMGETERVSREGEATEELHITNWSKRMDHRHHAIDALVVACTRQSYIQRLNRLSSEFGREDKKKEDQEAQEQQATETGRLSNLERWLTQRPHFSVRTVSDKVAEILISYRPGQRVVTRGRNIYRKKMADGREVSCVQRGVLVPRGELMEASFYGKILSQGRVRIVKRYPLHDLKGEVVDPHLRELITTYNQELKSREKGAPIPPLCLDKDKKQEVRSVRCYAKTLSLDKAIPMCFDEKGEPTAFVKSASNHHLALYRTPKGKLVESIVTFWDAVDRARYGIPLVITHPREVMEQVLQRGDIPEQVLSLLPPSDWVFVDSLQQDEMVVIGLSDEELQRALEAQNYRKISEHLYRVQKMSSSYYVFRYHLETSVADDKNTSGRIPKFHRVQSLKAYEERNIRKVRVDLLGRISLL

SEQ ID NO: 346 - protein, 1121 aa, Streptococcus thermophilus
MSDLVLGLDIGIGSVGVGILNKVTGEIIHKNSRIFPAAQAENNLVRRTNRQGRRLARRKKHRRVRLNRLFEESGLITDFTKISINLNPYQLRVKGLTDELSNEELFIALKNMVKHRGISYLDDASDDGNSSVGDYAQIVKENSKQLETKTPGQIQLERYQTYGQLRGDFTVEKDGKKHRLINVFPTSAYRSEALRILQTQQEFNPQITDEFINRYLEILTGKRKYYHGPGNEKSRTDYGRYRTSGETLDNIFGILIGKCTFYPDEFRAAKASYTAQEFNLLNDLNNLTVPTETKKLSKEQKNQIINYVKNEKAMGPAKLFKYIAKLLSCDVADIKGYRIDKSGKAEIHTFEAYRKMKTLETLDIEQMDRETLDKLAYVLTLNTEREGIQEALEHEFADGSFSQKQVDELVQFRKANSSIFGKGWHNFSVKLMMELIPELYETSEEQMTILTRLGKQKTTSSSNKTKYIDEKLLTEEIYNPVVAKSVRQAIKIVNAAIKEYGDFDNIVIEMARETNEDDEKKAIQKIQKANKDEKDAAMLKAANQYNGKAELPHSVFHGHKQLATKIRLWHQQGERCLYTGKTISIHDLINNSNQFEVDHILPLSITFDDSLANKVLVYATANQEKGQRTPYQALDSMDDAWSFRELKAFVRESKTLSNKKKEYLLTEEDISKFDVRKKFIERNLVDTRYASRVVLNALQEHFRAHKIDTKVSVVRGQFTSQLRRHWGIEKTRDTYHHHAVDALIIAASSQLNLWKKQKNTLVSYSEDQLLDIETGELISDDEYKESVFKAPYQHFVDTLKSKEFEDSILFSYQVDSKFNRKISDATIYATRQAKVGKDKADETYVLGKIKDIYTQDGYDAFMKIYKKDKSKFLMYRHDPQTFEKVIEPILENYPNKQINEKGKEVPCNPFLKYKEEHGYIRKYSKKGNGPEIKSLKYYDSKLGNHIDITPKDSNNKVVLQSVSPWRADVYFNKTTGKYEILGLKYADLQFEKGTGTYKISQEKYNDIKKKEGVDSDSEFKFTLYKNDLLLVKDTETKEQQLFRFLSRTMPKQKHYVELKPYDKQKFEGGEALIKVLGNVANSGQCKKGLGKSNISIYKVRTDVLGNQHIIKNEGDKPKLDF

SEQ ID NO: 347 - protein, 1152 aa, Roseburia inulinivorans
MNAEHGKEGLLIMEENFQYRIGLDIGITSVGWAVLQNNSQDEPVRITDLGVRIFDVAENPKNGDALAAPRRDARTTRRRLRRRRHRLERIKFLLQENGLIEMDSFMERYYKGNLPDVYQLRYEGLDRKLKDEELAQVLIHIAKHRGFRSTRKAETKEKEGGAVLKATTENQKIMQEKGYRTVGEMLYLDEAFHTECLWNEKGYVLTPRNRPDDYKHTILRSMLVEEVHAIFAAQRAHGNQKATEGLEEAYVEIMTSQRSFDMGPGLQPDGKPSPYAMEGFGDRVGKCTFEKDEYRAPKATYTAELFVALQKINHTKLIDEFGTGRFFSEEERKTIIGLLLSSKELKYGTIRKKLNIDPSLKFNSLNYSAKKEGETEEERVLDTEKAKFASMFWTYEYSKCLKDRTEEMPVGEKADLFDRIGEILTAYKNDDSRSSRLKELGLSGEEIDGLLDLSPAKYQRVSLKAMRKMQPYLEDGLIYDKACEAAGYDFRALNDGNKKHLLKGEEINAIVNDITNPVVKRSVSQTIKVINAIIQKYGSPQAVNIELAREMSKNFQDRTNLEKEMKKRQQENERAKQQIIELGKQNPTGQDILKYRLWNDQGGYCLYSGKKIPLEELFDGGYDIDHILPYSITFDDSYRNKVLVTAQENRQKGNRTPYEYFGADEKRWEDYEASVRLLVRDYKKQQKLLKKNFTEEERKEFKERNLNDTKYITRVVYNMIRQNLELEPFNHPEKKKQVWAVNGAVTSYLRKRWGLMQKDRSTDRHHAMDAVVIACCTDGMIHKISRYMQGRELAYSRNFKFPDEETGEILNRDNFTREQWDEKFGVKVPLPWNSFRDELDIRLLNEDPKNFLLTHADVQRELDYPGWMYGEEESPIEEGRYINYIRPLFVSRMPNHKVTGSAHDATIRSARDYETRGVVITKVPLTDLKLNKDNEIEGYYDKDSDRLLYQALVRQLLLHGNDGKKAFAEDFHKPKADGTEGPVVRKVKIEKKQTSGVMVRGGTGIAANGEMVRIDVFRENGKYYFVPVYTADVVRKVLPNRAATHTKPYSEWRVMDDANFVFSLYSRDLIHVKSKKDIKTNLVNGGLLLQKEIFAYYTGADIATASIAGFANDSNFKFRGLGIQSLEIFEKCQVDILGNISVVRHENRQEFH

SEQ ID NO: 348 - protein, 1082 aa, Methylosinus trichosporium
MRVLGLDAGIASLGWALIEIEESNRGELSQGTIIGAGTWMFDAPEEKTQAGAKLKSEQRRTFRGQRRVVRRRRQRMNEVRRILHSHGLLPSSDRDALKQPGLDPWRIRAEALDRLLGPVELAVALGHIARHRGFKSNSKGAKTNDPADDTSKMKRAVNETREKLARFGSAAKMLVEDESFVLRQTPTKNGASEIVRRFRNREGDYSRSLLRDDLAAEMRALFTAQARFQSAIATADLQTAFTKAAFFQRPLQDSEKLVGPCPFEVDEKRAPKRGYSFELFRFLSRLNHVTLRDGKQERTLTRDELALAAADFGAAAKVSFTALRKKLKLPETTVFVGVKADEESKLDVVARSGKAAEGTARLRSVIVDALGELAWGALLCSPEKLDKIAEVISFRSDIGRISEGLAQAGCNAPLVDALTAAASDGRFDPFTGAGHISSKAARNILSGLRQGMTYDKACCAADYDHTASRERGAFDVGGHGREALKRILQEERISRELVGSPTARKALIESIKQVKAIVERYGVPDRIHVELARDVGKSIEEREEITRGIEKRNRQKDKLRGLFEKEVGRPPQDGARGKEELLRFELWSEQMGRCLYTDDYISPSQLVATDDAVQVDHILPWSRFADDSYANKTLCMAKANQDKKGRTPYEWFKAEKTDTEWDAFIVRVEALADMKGFKKRNYKLRNAEEAAAKFRNRNLNDTRWACRLLAEALKQLYPKGEKDKDGKERRRVFSRPGALTDRLRRAWGLQWMKKSTKGDRIPDDRHHALDAIVIAATTESLLQRATREVQEIEDKGLHYDLVKNVTPPWPGFREQAVEAVEKVFVARAERRRARGKAHDATIRHIAVREGEQRVYERRKVAELKLADLDRVKDAERNARLIEKLRNWIEAGSPKDDPPLSPKGDPIFKVRLVTKSKVNIALDTGNPKRPGTVDRGEMARVDVFRKASKKGKYEYYLVPIYPHDIATMKTPPIRAVQAYKPEDEWPEMDSSYEFCWSLVPMTYLQVISSKGEIFEGYYRGMNRSVGAIQLSAHSNSSDVVQGIGARTLTEFKKFNVDRFGRKHEVERELRTWRGETWRGKAYI

SEQ ID NO: 349 - protein, 1156 aa, Ruminococcus albus
MGNYYLGLDVGIGSIGWAVINIEKKRIEDFNVRIFKSGEIQEKNRNSRASQQCRRSRGLRRLYRRKSHRKLRLKNYLSIIGLTTSEKIDYYYETADNNVIQLRNKGLSEKLTPEEIAACLIHICNNRGYKDFYEVNVEDIEDPDERNEYKEEHDSIVLISNLMNEGGYCTPAEMICNCREFDEPNSVYRKFHNSAASKNHYLITRHMLVKEVDLILENQSKYYGILDDKTIAKIKDIIFAQRDFEIGPGKNERFRRFTGYLDSIGKCQFFKDQERGSRFTVIADIYAFVNVLSQYTYTNNRGESVFDTSFANDLINSALKNGSMDKRELKAIAKSYHIDISDKNSDTSLTKCFKYIKVVKPLFEKYGYDWDKLIENYTDTDNNVLNRIGIVLSQAQTPKRRREKLKALNIGLDDGLINELTKLKLSGTANVSYKYMQGSIEAFCEGDLYGKYQAKFNKEIPDIDENAKPQKLPPFKNEDDCEFFKNPVVFRSINETRKLINAIIDKYGYPAAVNIETADELNKTFEDRAIDTKRNNDNQKENDRIVKEIIECIKCDEVHARHLIEKYKLWEAQEGKCLYSGETITKEDMLRDKDKLFEVDHIVPYSLILDNTINNKALVYAEENQKKGQRTPLMYMNEAQAADYRVRVNTMFKSKKCSKKKYQYLMLPDLNDQELLGGWRSRNLNDTRYICKYLVNYLRKNLRFDRSYESSDEDDLKIRDHYRVFPVKSRFTSMFRRWWLNEKTWGRYDKAELKKLTYLDHAADAIIIANCRPEYVVLAGEKLKLNKMYHQAGKRITPEYEQSKKACIDNLYKLFRMDRRTAEKLLSGHGRLTPIIPNLSEEVDKRLWDKNIYEQFWKDDKDKKSCEELYRENVASLYKGDPKFASSLSMPVISLKPDHKYRGTITGEEAIRVKEIDGKLIKLKRKSISEITAESINSIYTDDKILIDSLKTIFEQADYKDVGDYLKKTNQHFFTTSSGKRVNKVTVIEKVPSRWLRKEIDDNNFSLLNDSSYYCIELYKDSKGDNNLQGIAMSDIVHDRKTKKLYLKPDFNYPDDYYTHVMYIFPGDYLRIKSTSKKSGEQLKFEGYFISVKNVNENSFRFISDNKPCAKDKRVSITKKDIVIKLAVDLMGKVQGENNGKGISCGEPLSLLKEKN

SEQ ID NO: 350 - protein, 1187 aa, Bifidobacterium longum
MLSRQLLGASHLARPVSYSYNVQDNDVHCSYGERCFMRGKRYRIGIDVGLNSVGLAAVEVSDENSPVRLLNAQSVIHDGGVDPQKNKEAITRKNMSGVARRTRRMRRRKRERLHKLDMLLGKFGYPVIEPESLDKPFEEWHVRAELATRYIEDDELRRESISIALRHMARHRGWRNPYRQVDSLISDNPYSKQYGELKEKAKAYNDDATAAEEESTPAQLVVAMLDAGYAEAPRLRWRTGSKKPDAEGYLPVRLMQEDNANELKQIFRVQRVPADEWKPLFRSVFYAVSPKGSAEQRVGQDPLAPEQARALKASLAFQEYRIANVITNLRIKDASAELRKLTVDEKQSIYDQLVSPSSEDITWSDLCDFLGFKRSQLKGVGSLTEDGEERISSRPPRLTSVQRIYESDNKIRKPLVAWWKSASDNEHEAMIRLLSNTVDIDKVREDVAYASAIEFIDGLDDDALTKLDSVDLPSGRAAYSVETLQKLTRQMLTTDDDLHEARKTLFNVTDSWRPPADPIGEPLGNPSVDRVLKNVNRYLMNCQQRWGNPVSVNIEHVRSSFSSVAFARKDKREYEKNNEKRSIFRSSLSEQLRADEQMEKVRESDLRRLEAIQRQNGQCLYCGRTITFRTCEMDHIVPRKGVGSTNTRTNFAAVCAECNRMKSNTPFAIWARSEDAQTRGVSLAEAKKRVTMFTFNPKSYAPREVKAFKQAVIARLQQTEDDAAIDNRSIESVAWMADELHRRIDWYFNAKQYVNSASIDDAEAETMKTTVSVFQGRVTASARRAAGIEGKIHFIGQQSKTRLDRRHHAVDASVIAMMNTAAAQTLMERESLRESQRLIGLMPGERSWKEYPYEGTSRYESFHLWLDNMDVLLELLNDALDNDRIAVMQSQRYVLGNSIAHDATIHPLEKVPLGSAMSADLIRRASTPALWCALTRLPDYDEKEGLPEDSHREIRVHDTRYSADDEMGFFASQAAQIAVQEGSADIGSAIHHARVYRCWKTNAKGVRKYFYGMIRVFQTDLLRACHDDLFTVPLPPQSISMRYGEPRVVQALQSGNAQYLGSLVVGDEIEMDFSSLDVDGQIGEYLQFFSQFSGGNLAWKHWVVDGFFNQTQLRIRPRYLAAEGLAKAFSDDVVPDGVQKIVTKQGWLPPVNTASKTAVRIVRRNAFGEPRLSSAHHMPCSWQWRHE

SEQ ID NO: 351 - protein, 1150 aa, Enterococcus faecalis
MYSIGLDLGISSVGWSVIDERTGNVIDLGVRLFSAKNSEKNLERRTNRGGRRLIRRKTNRLKDAKKILAAVGFYEDKSLKNSCPYQLRVKGLTEPLSRGEIYKVTLHILKKRGISYLDEVDTEAAKESQDYKEQVRKNAQLLTKYTPGQIQLQRLKENNRVKTGINAQGNYQLNVFKVSAYANELATILKTQQAFYPNELTDDWIALFVQPGIAEEAGLIYRKRPYYHGPGNEANNSPYGRWSDFQKTGEPATNIFDKLIGKDFQGELRASGLSLSAQQYNLLNDLTNLKIDGEVPLSSEQKEYILTELMTKEFTRFGVNDVVKLLGVKKERLSGWRLDKKGKPEIHTLKGYRNWRKIFAEAGIDLATLPTETIDCLAKVLTLNTEREGIENTLAFELPELSESVKLLVLDRYKELSQSISTQSWHRFSLKTLHLLIPELMNATSEQNTLLEQFQLKSDVRKRYSEYKKLPTKDVLAEIYNPTVNKTVSQAFKVIDALLVKYGKEQIRYITIEMPRDDNEEDEKKRIKELHAKNSQRKNDSQSYFMQKSGWSQEKFQTTIQKNRRFLAKLLYYYEQDGICAYTGLPISPELLVSDSTEIDHIIPISISLDDSINNKVLVLSKANQVKGQQTPYDAWMDGSFKKINGKFSNWDDYQKWVESRHFSHKKENNLLETRNIFDSEQVEKFLARNLNDTRYASRLVLNTLQSFFTNQETKVRVVNGSFTHTLRKKWGADLDKTRETHHHHAVDATLCAVTSFVKVSRYHYAVKEETGEKVMREIDFETGEIVNEMSYWEFKKSKKYERKTYQVKWPNFREQLKPVNLHPRIKFSHQVDRKANRKLSDATIYSVREKTEVKTLKSGKQKITTDEYTIGKIKDIYTLDGWEAFKKKQDKLLMKDLDEKTYERLLSIAETTPDFQEVEEKNGKVKRVKRSPFAVYCEENDIPAIQKYAKKNNGPLIRSLKYYDGKLNKHINITKDSQGRPVEKTKNGRKVTLQSLKPYRYDIYQDLETKAYYTVQLYYSDLRFVEGKYGITEKEYMKKVAEQTKGQVVRFCFSLQKNDGLEIEWKDSQRYDVRFYNFQSANSINFKGLEQEMMPAENQFKQKPYNNGAINLNIAKYGKEGKKLRKFNTDILGKKHYLFYEKEPKNIIK

SEQ ID NO: 352 - protein, 1236 aa, Mycoplasma mobile
MYFYKNKENKLNKKVVLGLDLGIASVGWCLTDISQKEDNKFPIILHGVRLFETVDDSDDKLLNETRRKKRGQRRRNRRLFTRKRDFIKYLIDNNIIELEFDKNPKILVRNFIEKYINPFSKNLELKYKSVTNLPIGFHNLRKAAINEKYKLDKSELIVLLYFYLSLRGAFFDNPEDTKSKEMNKNEIEIFDKNESIKNAEFPIDKIIEFYKISGKIRSTINLKFGHQDYLKEIKQVFEKQNIDFMNYEKFAMEEKSFFSRIRNYSEGPGNEKSFSKYGLYANENGNPELIINEKGQKIYTKIFKTLWESKIGKCSYDKKLYRAPKNSFSAKVFDITNKLTDWKHKNEYISERLKRKILLSRFLNKDSKSAVEKILKEENIKFENLSEIAYNKDDNKINLPIINAYHSLTTIFKKHLINFENYLISNENDLSKLMSFYKQQSEKLFVPNEKGSYEINQNNNVLHIFDAISNILNKFSTIQDRIRILEGYFEFSNLKKDVKSSEIYSEIAKLREFSGTSSLSFGAYYKFIPNLISEGSKNYSTISYEEKALQNQKNNFSHSNLFEKTWVEDLIASPTVKRSLRQTMNLLKEIFKYSEKNNLEIEKIVVEVTRSSNNKHERKKIEGINKYRKEKYEELKKVYDLPNENTTLLKKLWLLRQQQGYDAYSLRKIEANDVINKPWNYDIDHIVPRSISFDDSFSNLVIVNKLDNAKKSNDLSAKQFIEKIYGIEKLKEAKENWGNWYLRNANGKAFNDKGKFIKLYTIDNLDEFDNSDFINRNLSDTSYITNALVNHLTFSNSKYKYSVVSVNGKQTSNLRNQIAFVGIKNNKETEREWKRPEGFKSINSNDFLIREEGKNDVKDDVLIKDRSFNGHHAEDAYFITIISQYFRSFKRIERLNVNYRKETRELDDLEKNNIKFKEKASFDNFLLINALDELNEKLNQMRFSRMVITKKNTQLFNETLYSGKYDKGKNTIKKVEKLNLLDNRTDKIKKIEEFFDEDKLKENELTKLHIFNHDKNLYETLKIIWNEVKIEIKNKNLNEKNYFKYFVNKKLQEGKISFNEWVPILDNDFKIIRKIRYIKFSSEEKETDEIIFSQSNFLKIDQRQNFSFHNTLYWVQIWVYKNQKDQYCFISIDARNSKFEKDEIKINYEKLKTQKEKLQIINEEPILKINKGDLFENEEKELFYIVGRDEKPQKLEIKYILGKKIKDQKQIQKPVKKYFPNWKKVNLTYMGEIFKK

SEQ ID NO: 353 - protein, 1105 aa, Actinomyces coleocanis
MDNKNYRIGIDVGLNSIGFCAVEVDQHDTPLGFLNLSVYRHDAGIDPNGKKTNTTRLAMSGVARRTRRLFRKRKRRLAALDRFIEAQGWTLPDHADYKDPYTPWLVRAELAQTPIRDENDLHEKLAIAVRHIARHRGWRSPWVPVRSLHVEQPPSDQYLALKERVEAKTLLQMPEGATPAEMVVALDLSVDVNLRPKNREKTDTRPENKKPGFLGGKLMQSDNANELRKIAKIQGLDDALLRELIELVFAADSPKGASGELVGYDVLPGQHGKRRAEKAHPAFQRYRIASIVSNLRIRHLGSGADERLDVETQKRVFEYLLNAKPTADITWSDVAEEIGVERNLLMGTATQTADGERASAKPPVDVTNVAFATCKIKPLKEWWLNADYEARCVMVSALSHAEKLTEGTAAEVEVAEFLQNLSDEDNEKLDSFSLPIGRAAYSVDSLERLTKRMIENGEDLFEARVNEFGVSEDWRPPAEPIGARVGNPAVDRVLKAVNRYLMAAEAEWGAPLSVNIEHVREGFISKRQAVEIDRENQKRYQRNQAVRSQIADHINATSGVRGSDVTRYLAIQRQNGECLYCGTAITFVNSEMDHIVPRAGLGSTNTRDNLVATCERCNKSKSNKPFAVWAAECGIPGVSVAEALKRVDFWIADGFASSKEHRELQKGVKDRLKRKVSDPEIDNRSMESVAWMARELAHRVQYYFDEKHTGTKVRVFRGSLTSAARKASGFESRVNFIGGNGKTRLDRRHHAMDAATVAMLRNSVAKTLVLRGNIRASERAIGAAETWKSFRGENVADRQIFESWSENMRVLVEKFNLALYNDEVSIFSSLRLQLGNGKAHDDTITKLQMHKVGDAWSLTEIDRASTPALWCALTRQPDFTWKDGLPANEDRTIIVNGTHYGPLDKVGIFGKAAASLLVRGGSVDIGSAIHHARIYRIAGKKPTYGMVRVFAPDLLRYRNEDLFNVELPPQSVSMRYAEPKVREAIREGKAEYLGWLVVGDELLLDLSSETSGQIAELQQDFPGTTHWTVAGFFSPSRLRLRPVYLAQEGLGEDVSEGSKSIIAGQGWRPAVNKVFGSAMPEVIRRDGLGRKRRFSYSGLPVSWQG

SEQ ID NO: 354 - protein, 1079 aa, Dinoroseobacter shibae
MRLGLDIGTSSIGWWLYETDGAGSDARITGVVDGGVRIFSDGRDPKSGASLAVDRRAARAMRRRRDRYLRRRATLMKVLAETGLMPADPAEAKALEALDPFALRAAGLDEPLPLPHLGRALFHLNQRRGFKSNRKTDRGDNESGKIKDATARLDMEMMANGARTYGEFLHKRRQKATDPRHVPSVRTRLSIANRGGPDGKEEAGYDFYPDRRHLEEEFHKLWAAQGAHHPELTETLRDLLFEKIFFQRPLKEPEVGLCLFSGHHGVPPKDPRLPKAHPLTQRRVLYETVNQLRVTADGREARPLTREERDQVIHALDNKKPTKSLSSMVLKLPALAKVLKLRDGERFTLETGVRDAIACDPLRASPAHPDRFGPRWSILDADAQWEVISRIRRVQSDAEHAALVDWLTEAHGLDRAHAEATAHAPLPDGYGRLGLTATTRILYQLTADVVTYADAVKACGWHHSDGRTGECFDRLPYYGEVLERHVIPGSYHPDDDDITRFGRITNPTVHIGLNQLRRLVNRIIETHGKPHQIVVELARDLKKSEEQKRADIKRIRDTTEAAKKRSEKLEELEIEDNGRNRMLLRLWEDLNPDDAMRRFCPYTGTRISAAMIFDGSCDVDHILPYSRTLDDSFPNRTLCLREANRQKRNQTPWQAWGDTPHWHAIAANLKNLPENKRWRFAPDAMTRFEGENGFLDRALKDTQYLARISRSYLDTLFTKGGHVWVVPGRFTEMLRRHWGLNSLLSDAGRGAVKAKNRTDHRHHAIDAAVIAATDPGLLNRISRAAGQGEAAGQSAELIARDTPPPWEGFRDDLRVRLDRIIVSHRADHGRIDHAARKQGRDSTAGQLHQETAYSIVDDIHVASRTDLLSLKPAQLLDEPGRSGQVRDPQLRKALRVATGGKTGKDFENALRYFASKPGPYQAIRRVRIIKPLQAQARVPVPAQDPIKAYQGGSNHLFEIWRLPDGEIEAQVITSFEAHTLEGEKRPHPAAKRLLRVHKGDMVALERDGRRVVGHVQKMDIANGLFIVPHNEANADTRNNDKSDPFKWIQIGARPAIASGIRRVSVDEIGRLRDGGTRPI

SEQ ID NO: 355 - protein, 1181 aa, Actinomyces sp.
MLHCIAVIRVPPSEEPGFFETHADSCALCHHGCMTYAANDKAIRYRVGIDVGLRSIGFCAVEVDDEDHPIRILNSVVHVHDAGTGGPGETESLRKRSGVAARARRRGRAEKQRLKKLDVLLEELGWGVSSNELLDSHAPWHIRKRLVSEYIEDETERRQCLSVAMAHIARHRGWRNSFSKVDTLLLEQAPSDRMQGLKERVEDRTGLQFSEEVTQGELVATLLEHDGDVTIRGFVRKGGKATKVHGVLEGKYMQSDLVAELRQICRTQRVSETTFEKLVLSIFHSKEPAPSAARQRERVGLDELQLALDPAAKQPRAERAHPAFQKFKVVATLANMRIREQSAGERSLTSEELNRVARYLLNHTESESPTWDDVARKLEVPRHRLRGSSRASLETGGGLTYPPVDDTTVRVMSAEVDWLADWWDCANDESRGHMIDAISNGCGSEPDDVEDEEVNELISSATAEDMLKLELLAKKLPSGRVAYSLKTLREVTAAILETGDDLSQAITRLYGVDPGWVPTPAPIEAPVGNPSVDRVLKQVARWLKFASKRWGVPQTVNIEHTREGLKSASLLEEERERWERFEARREIRQKEMYKRLGISGPFRRSDQVRYEILDLQDCACLYCGNEINFQTFEVDHIIPRVDASSDSRRTNLAAVCHSCNSAKGGLAFGQWVKRGDCPSGVSLENAIKRVRSWSKDRLGLTEKAMGKRKSEVISRLKTEMPYEEFDGRSMESVAWMAIELKKRIEGYFNSDRPEGCAAVQVNAYSGRLTACARRAAHVDKRVRLIRLKGDDGHHKNRFDRRNHAMDALVIALMTPAIARTIAVREDRREAQQLTRAFESWKNFLGSEERMQDRWESWIGDVEYACDRLNELIDADKIPVTENLRLRNSGKLHADQPESLKKARRGSKRPRPQRYVLGDALPADVINRVTDPGLWTALVRAPGFDSQLGLPADLNRGLKLRGKRISADFPIDYFPTDSPALAVQGGYVGLEFHHARLYRIIGPKEKVKYALLRVCAIDLCGIDCDDLFEVELKPSSISMRTADAKLKEAMGNGSAKQIGWLVLGDEIQIDPTKFPKQSIGKFLKECGPVSSWRVSALDTPSKITLKPRLLSNEPLLKTSRVGGHESDLVVAECVEKIMKKTGWVVEINALCQSGLIRVIRRNALGEVRTSPKSGLPISLNLR

SEQ ID NO: 356 - protein, 1113 aa, Alcanivorax sp.
MRYRVGLDLGTASVGAAVFSMDEQGNPMELIWHYERLFSEPLVPDMGQLKPKKAARRLARQQRRQIDRRASRLRRIAIVSRRLGIAPGRNDSGVHGNDVPTLRAMAVNERIELGQLRAVLLRMGKKRGYGGTFKAVRKVGEAGEVASGASRLEEEMVALASVQNKDSVTVGEYLAARVEHGLPSKLKVAANNEYYAPEYALFRQYLGLPAIKGRPDCLPNMYALRHQIEHEFERIWATQSQFHDVMKDHGVKEEIRNAIFFQRPLKSPADKVGRCSLQTNLPRAPRAQIAAQNFRIEKQMADLRWGMGRRAEMLNDHQKAVIRELLNQQKELSFRKIYKELERAGCPGPEGKGLNMDRAALGGRDDLSGNTTLAAWRKLGLEDRWQELDEVTQIQVINFLADLGSPEQLDTDDWSCRFMGKNGRPRNFSDEFVAFMNELRMTDGFDRLSKMGFEGGRSSYSIKALKALTEWMIAPHWRETPETHRVDEEAAIRECYPESLATPAQGGRQSKLEPPPLTGNEVVDVALRQVRHTINMMIDDLGSVPAQIVVEMAREMKGGVTRRNDIEKQNKRFASERKKAAQSIEENGKTPTPARILRYQLWIEQGHQCPYCESNISLEQALSGAYTNFEHILPRTLTQIGRKRSELVLAHRECNDEKGNRTPYQAFGHDDRRWRIVEQRANALPKKSSRKTRLLLLKDFEGEALTDESIDEFADRQLHESSWLAKVTTQWLSSLGSDVYVSRGSLTAELRRRWGLDTVIPQVRFESGMPVVDEEGAEITPEEFEKFRLQWEGHRVTREMRTDRRPDKRIDHRHHLVDAIVTALTSRSLYQQYAKAWKVADEKQRHGRVDVKVELPMPILTIRDIALEAVRSVRISHKPDRYPDGRFFEATAYGIAQRLDERSGEKVDWLVSRKSLTDLAPEKKSIDVDKVRANISRIVGEAIRLHISNIFEKRVSKGMTPQQALREPIEFQGNILRKVRCFYSKADDCVRIEHSSRRGHHYKMLLNDGFAYMEVPCKEGILYGVPNLVRPSEAVGIKRAPESGDFIRFYKGDTVKNIKTGRVYTIKQILGDGGGKLILTPVTETKPADLLSAKWGRLKVGGRNIHLLRLCAE

SEQ ID NO: 357 - protein, 1052 aa, Aminomonas paucivorans
MIGEHVRGGCLFDDHWTPNWGAFRLPNTVRTFTKAENPKDGSSLAEPRRQARGLRRRLRRKTQRLEDLRRLLAKEGVLSLSDLETLFRETPAKDPYQLRAEGLDRPLSFPEWVRVLYHITKHRGFQSNRRNPVEDGQERSRQEEEGKLLSGVGENERLLREGGYRTAGEMLARDPKFQDHRRNRAGDYSHTLSRSLLLEEARRLFQSQRTLGNPHASSNLEEAFLHLVAFQNPFASGEDIRNKAGHCSLEPDQIRAPRRSASAETFMLLQKTGNLRLIHRRTGEERPLTDKEREQIHLLAWKQEKVTHKTLRRHLEIPEEWLFTGLPYHRSGDKAEEKLFVHLAGIHEIRKALDKGPDPAVWDTLRSRRDLLDSIADTLTFYKNEDEILPRLESLGLSPENARALAPLSFSGTAHLSLSALGKLLPHLEEGKSYTQARADAGYAAPPPDRHPKLPPLEEADWRNPVVFRALTQTRKVVNALVRRYGPPWCIHLETARELSQPAKVRRRIETEQQANEKKKQQAEREFLDIVGTAPGPGDLLKMRLWREQGGFCPYCEEYLNPTRLAEPGYAEMDHILPYSRSLDNGWHNRVLVHGKDNRDKGNRTPFEAFGGDTARWDRLVAWVQASHLSAPKKRNLLREDFGEEAERELKDRNLTDTRFITKTAATLLRDRLTFHPEAPKDPVMTLNGRLTAFLRKQWGLHKNRKNGDLHHALDAAVLAVASRSFVYRLSSHNAAWGELPRGREAENGFSLPYPAFRSEVLARLCPTREEILLRLDQGGVGYDEAFRNGLRPVFVSRAPSRRLRGKAHMETLRSPKWKDHPEGPRTASRIPLKDLNLEKLERMVGKDRDRKLYEALRERLAAFGGNGKKAFVAPFRKPCRSGEGPLVRSLRIFDSGYSGVELRDGGEVYAVADHESMVRVDVYAKKNRFYLVPVYVADVARGIVKNRAIVAHKSEEEWDLVDGSFDFRFSLFPGDLVEIEKKDGAYLGYYKSCHRGDGRLLLDRHDRMPRESDCGTFYVSTRKDVLSMSKYQVDPLGEIRLVGSEKPPFVL

SEQ ID NO: 358 - protein, 1233 aa, Mycoplasma canis
MEKKRKVTLGFDLGIASVGWAIVDSETNQVYKLGSRLFDAPDTNLERRTQRGTRRLLRRRKYRNQKFYNLVKRTEVFGLSSREAIENRFRELSIKYPNIIELKTKALSQEVCPDEIAWILHDYLKNRGYFYDEKETKEDFDQQTVESMPSYKLNEFYKKYGYFKGALSQPTESEMKDNKDLKEAFFFDFSNKEWLKEINYFFNVQKNILSETFIEEFKKIFSFTRDISKGPGSDNMPSPYGIFGEFGDNGQGGRYEHIWDKNIGKCSIFTNEQRAPKYLPSALIFNFLNELANIRLYSTDKKNIQPLWKLSSVDKLNILLNLFNLPISEKKKKLTSTNINDIVKKESIKSIMISVEDIDMIKDEWAGKEPNVYGVGLSGLNIEESAKENKFKFQDLKILNVLINLLDNVGIKFEFKDRNDIIKNLELLDNLYLFLIYQKESNNKDSSIDLFIAKNESLNIENLKLKLKEFLLGAGNEFENHNSKTHSLSKKAIDEILPKLLDNNEGWNLEAIKNYDEEIKSQIEDNSSLMAKQDKKYLNDNFLKDAILPPNVKVTFQQAILIFNKIIQKFSKDFEIDKVVIELAREMTQDQENDALKGIAKAQKSKKSLVEERLEANNIDKSVFNDKYEKLIYKIFLWISQDFKDPYTGAQISVNEIVNNKVEIDHIIPYSLCFDDSSANKVLVHKQSNQEKSNSLPYEYIKQGHSGWNWDEFTKYVKRVFVNNVDSILSKKERLKKSENLLTASYDGYDKLGFLARNLNDTRYATILFRDQLNNYAEHHLIDNKKMFKVIAMNGAVTSFIRKNMSYDNKLRLKDRSDFSHHAYDAAIIALFSNKTKTLYNLIDPSLNGIISKRSEGYWVIEDRYTGEIKELKKEDWTSIKNNVQARKIAKEIEEYLIDLDDEVFFSRKTKRKTNRQLYNETIYGIATKTDEDGITNYYKKEKFSILDDKDIYLRLLREREKFVINQSNPEVIDQIIEIIESYGKENNIPSRDEAINIKYTKNKINYNLYLKQYMRSLTKSLDQFSEEFINQMIANKTFVLYNPTKNTTRKIKFLRLVNDVKINDIRKNQVINKFNGKNNEPKAFYENINSLGAIVFKNSANNFKTLSINTQIAIFGDKNWDIEDFKTYNMEKIEKYKEIYGIDKTYNFHSFIFPGTILLDKQNKEFYYISSIQTVRDIIEIKFLNKIEFKDENKNQDTSKTPKRLMFGIKSIMNNYEQVDISPFGINKKIFE

SEQ ID NO: 359 - protein, 1119 aa, Lactobacillus coryniformis
MGYRIGLDVGITSTGYAVLKTDKNGLPYKILTLDSVIYPRAENPQTGASLAEPRRIKRGLRRRTRRTKFRKQRTQQLFIHSGLLSKPEIEQILATPQAKYSVYELRVAGLDRRLTNSELFRVLYFFIGHRGFKSNRKAELNPENEADKKQMGQLLNSIEEIRKAIAEKGYRTVGELYLKDPKYNDHKRNKGYIDGYLSTPNRQMLVDEIKQILDKQRELGNEKLTDEFYATYLLGDENRAGIFQAQRDFDEGPGAGPYAGDQIKKMVGKDIFEPTEDRAAKATYTFQYFNLLQKMTSLNYQNTTGDTWHTLNGLDRQAIIDAVFAKAEKPTKTYKPTDFGELRKLLKLPDDARFNLVNYGSLQTQKEIETVEKKTRFVDFKAYHDLVKVLPEEMWQSRQLLDHIGTALTLYSSDKRRRRYFAEELNLPAELIEKLLPLNFSKFGHLSIKSMQNIIPYLEMGQVYSEATTNTGYDFRKKQISKDTIREEITNPVVRRAVTKTIKIVEQIIRRYGKPDGINIELARELGRNFKERGDIQKRQDKNRQTNDKIAAELTELGIPVNGQNIIRYKLHKEQNGVDPYTGDQIPFERAFSEGYEVDHIIPYSISWDDSYTNKVLTSAKCNREKGNRIPMVYLANNEQRLNALTNIADNIIRNSRKRQKLLKQKLSDEELKDWKQRNINDTRFITRVLYNYFRQAIEFNPELEKKQRVLPLNGEVTSKIRSRWGFLKVREDGDLHHAIDATVIAAITPKFIQQVTKYSQHQEVKNNQALWHDAEIKDAEYAAEAQRMDADLFNKIFNGFPLPWPEFLDELLARISDNPVEMMKSRSWNTYTPIEIAKLKPVFVVRLANHKISGPAHLDTIRSAKLFDEKGIVLSRVSITKLKINKKGQVATGDGIYDPENSNNGDKVVYSAIRQALEAHNGSGELAFPDGYLEYVDHGTKKLVRKVRVAKKVSLPVRLKNKAAADNGSMVRIDVFNTGKKFVFVPIYIKDTVEQVLPNKAIARGKSLWYQITESDQFCFSLYPGDMVHIESKTGIKPKYSNKENNTSVVPIKNFYGYFDGADIATASILVRAHDSSYTARSIGIAGLLKFEKYQVDYFGRYHKVHEKKRQLFVKRDE

SEQ ID NO: 360 - protein, 1195 aa, Elusimicrobium minutum
MQKNINTKQNHIYIKQAQKIKEKLGDKPYRIGLDLGVGSIGFAIVSMEENDGNVLLPKEIIMVGSRIFKASAGAADRKLSRGQRNNHRHTRERMRYLWKVLAEQKLALPVPADLDRKENSSEGETSAKRFLGDVLQKDIYELRVKSLDERLSLQELGYVLYHIAGHRGSSAIRTFENDSEEAQKENTENKKIAGNIKRLMAKKNYRTYGEYLYKEFFENKEKHKREKISNAANNHKFSPTRDLVIKEAEAILKKQAGKDGFHKELTEEYIEKLTKAIGYESEKLIPESGFCPYLKDEKRLPASHKLNEERRLWETLNNARYSDPIVDIVTGEITGYYEKQFTKEQKQKLFDYLLTGSELTPAQTKKLLGLKNTNFEDIILQGRDKKAQKIKGYKLIKLESMPFWARLSEAQQDSFLYDWNSCPDEKLLTEKLSNEYHLTEEEIDNAFNEIVLSSSYAPLGKSAMLIILEKIKNDLSYTEAVEEALKEGKLTKEKQAIKDRLPYYGAVLQESTQKIIAKGFSPQFKDKGYKTPHTNKYELEYGRIANPVVHQTLNELRKLVNEIIDILGKKPCEIGLETARELKKSAEDRSKLSREQNDNESNRNRIYEIYIRPQQQVIITRRENPRNYILKFELLEEQKSQCPFCGGQISPNDIINNQADIEHLFPIAESEDNGRNNLVISHSACNADKAKRSPWAAFASAAKDSKYDYNRILSNVKENIPHKAWRFNQGAFEKFIENKPMAARFKTDNSYISKVAHKYLACLFEKPNIICVKGSLTAQLRMAWGLQGLMIPFAKQLITEKESESFNKDVNSNKKIRLDNRHHALDAIVIAYASRGYGNLLNKMAGKDYKINYSERNWLSKILLPPNNIVWENIDADLESFESSVKTALKNAFISVKHDHSDNGELVKGTMYKIFYSERGYTLTTYKKLSALKLTDPQKKKTPKDFLETALLKFKGRESEMKNEKIKSAIENNKRLFDVIQDNLEKAKKLLEEENEKSKAEGKKEKNINDASIYQKAISLSGDKYVQLSKKEPGKFFAISKPTPTTTGYGYDTGDSLCVDLYYDNKGKLCGEIIRKIDAQQKNPLKYKEQGFTLFERIYGGDILEVDFDIHSDKNSFRNNTGSAPENRVFIKVGTFTEITNNNIQIWFGNIIKSTGGQDDSFTINSMQQYNPRKLILSSCGFIKYRSPILKNKEG

SEQ ID NO: 361 - skipped

SEQ ID NO: 362 - protein, 1056 aa, Pasteurella multocida
MQTTNLSYILGLDLGIASVGWAVVEINENEDPIGLIDVGVRIFERAEVPKTGESLALSRRLARSTRRLIRRRAHRLLLAKRFLKREGILSTIDLEKGLPNQAWELRVAGLERRLSAIEWGAVLLHLIKHRGYLSKRKNESQTNNKELGALLSGVAQNHQLLQSDDYRTPAELALKKFAKEEGHIRNQRGAYTHTFNRLDLLAELNLLFAQQHQFGNPHCKEHIQQYMTELLMWQKPALSGEAILKMLGKCTHEKNEFKAAKHTYSAERFVWLTKLNNLRILEDGAERALNEEERQLLINHPYEKSKLTYAQVRKLLGLSEQAIFKHLRYSKENAESATFMELKAWHAIRKALENQGLKDTWQDLAKKPDLLDEIGTAFSLYKTDEDIQQYLTNKVPNSVINALLVSLNFDKFIELSLKSLRKILPLMEQGKRYDQACREIYGHHYGEANQKTSQLLPAIPAQEIRNPVVLRTLSQARKVINAIIRQYGSPARVHIETGRELGKSFKERREIQKQQEDNRTKRESAVQKFKELFSDFSSEPKSKDILKFRLYEQQHGKCLYSGKEINIHRLNEKGYVEIDHALPFSRTWDDSFNNKVLVLASENQNKGNQTPYEWLQGKINSERWKNFVALVLGSQCSAAKKQRLLTQVIDDNKFIDRNLNDTRYIARFLSNYIQENLLLVGKNKKNVFTPNGQITALLRSRWGLIKARENNNRHHALDAIVVACATPSMQQKITRFIRFKEVHPYKIENRYEMVDQESGEIISPHFPEPWAYFRQEVNIRVFDNHPDTVLKEMLPDRPQANHQFVQPLFVSRAPTRKMSGQGHMETIKSAKRLAEGISVLRIPLTQLKPNLLENMVNKEREPALYAGLKARLAEFNQDPAKAFATPFYKQGGQQVKAIRVEQVQKSGVLVRENNGVADNASIVRTDVFIKNNKFFLVPIYTWQVAKGILPNKAIVAHKNEDEWEEMDEGAKFKFSLFPNDLVELKTKKEYFFGYYIGLDRATGNISLKEHDGEISKGKDGVYRVGVKLALSFEKYQVDELGKNRQICRPQQRQPVR

SEQ ID NO: 363 - protein, 1059 aa, Rhodovulum sp.
MGIRFAFDLGTNSIGWAVWRTGPGVFGEDTAASLDGSGVLIFKDGRNPKDGQSLATMRRVPRQSRKRRDRFVLRRRDLLAALRKAGLFPVDVEEGRRLAATDPYHLRAKALDESLTPHEMGRVIFHLNQRRGFRSNRKADRQDREKGKIAEGSKRLAETLAATNCRTLGEFLWSRHRGTPRTRSPTRIRMEGEGAKALYAFYPTREMVRAEFERLWTAQSRFAPDLLTPERHEEIAGILFRQRDLAPPKIGCCTFEPSERRLPRALPSVEARGIYERLAHLRITTGPVSDRGLTRPERDVLASALLAGKSLTFKAVRKTLKILPHALVNFEEAGEKGLDGALTAKLLSKPDHYGAAWHGLSFAEKDTFVGKLLDEADEERLIRRLVTENRLSEDAARRCASIPLADGYGRLGRTANTEILAALVEETDETGTVVTYAEAVRRAGERTGRNWHHSDERDGVILDRLPYYGEILQRHVVPGSGEPEEKNEAARWGRLANPTVHIGLNQLRKVVNRLIAAHGRPDQIVVELARELKLNREQKERLDRENRKNREENERRTAILAEHGQRDTAENKIRLRLFEEQARANAGIALCPYTGRAIGIAELFTSEVEIDHILPVSLTLDDSLANRVLCRREANREKRRQTPFQAFGATPAWNDIVARAAKLPPNKRWRFDPAALERFEREGGFLGRQLNETKYLSRLAKIYLGKICDPDRVYVTPGTLTGLLRARWGLNSILSDSNFKNRSDHRHHAVDAVVIGVLTRGMIQRIAHDAARAEDQDLDRVFRDVPVPFEDFRDHVRERVSTITVAVKPEHGKGGALHEDTSYGLVPDTDPNAALGNLVVRKPIRSLTAGEVDRVRDRALRARLGALAAPFRDESGRVRDAKGLAQALEAFGAENGIRRVRILKPDASVVTIADRRTGVPYRAVAPGENHHVDIVQMRDGSWRGFAASVFEVNRPGWRPEWEVKKLGGKLVMRLHKGDMVELSDKDGQRRVKVVQQIEISANRVRLSPHNDGGKLQDRHADADDPFRWDLATIPLLKDRGCVAVRVDPIGVVTLRRSNV

SEQ ID NO: 364 - protein, 1096 aa, Eubacterium dolichum
MMEVFMGRLVLGLDIGITSVGFGIIDLDESEIVDYGVRLFKEGTAAENETRRTKRGGRRLKRRRVTRREDMLHLLKQAGIISTSFHPLNNPYDVRVKGLNERLNGEELATALLHLCKHRGSSVETIEDDEAKAKEAGETKKVLSMNDQLLKSGKYVCEIQKERLRTNGHIRGHENNFKTRAYVDEAFQILSHQDLSNELKSAIITIISRKRMYYDGPGGPLSPTPYGRYTYFGQKEPIDLIEKMRGKCSLFPNEPRAPKLAYSAELFNLLNDLNNLSIEGEKLTSEQKAMILKIVHEKGKITPKQLAKEVGVSLEQIRGFRIDTKGSPLLSELTGYKMIREVLEKSNDEHLEDHVFYDEIAEILTKTKDIEGRKKQISELSSDLNEESVHQLAGLTKFTAYHSLSFKALRLINEEMLKTELNQMQSITLFGLKQNNELSVKGMKNIQADDTAILSPVAKRAQRETFKVVNRLREIYGEFDSIVVEMAREKNSEEQRKAIRERQKFFEMRNKQVADIIGDDRKINAKLREKLVLYQEQDGKTAYSLEPIDLKLLIDDPNAYEVDHIIPISISLDDSITNKVLVTHRENQEKGNLTPISAFVKGRFTKGSLAQYKAYCLKLKEKNIKTNKGYRKKVEQYLLNENDIYKYDIQKEFINRNLVDTSYASRVVLNTLTTYFKQNEIPTKVFTVKGSLTNAFRRKINLKKDRDEDYGHHAIDALIIASMPKMRLLSTIFSRYKIEDIYDESTGEVFSSGDDSMYYDDRYFAFIASLKAIKVRKFSHKIDTKPNRSVADETIYSTRVIDGKEKVVKKYKDIYDPKFTALAEDILNNAYQEKYLMALHDPQTFDQIVKVVNYYFEEMSKSEKYFTKDKKGRIKISGMNPLSLYRDEHGMLKKYSKKGDGPAITQMKYFDGVLGNHIDISAHYQVRDKKVVLQQISPYRTDFYYSKENGYKFVTIRYKDVRWSEKKKKYVIDQQDYAMKKAEKKIDDTYEFQFSMHRDELIGITKAEGEALIYPDETWHNFNFFFHAGETPEILKFTATNNDKSNKIEVKPIHCYCKMRLMPTISKKIVRIDKYATDVVGNLYKVKKNTLKFEFD

SEQ ID NO: 365 - protein, 1132 aa, Nitratifractor salsuginis
MKKILGVDLGITSFGYAILQETGKDLYRCLDNSVVMRNNPYDEKSGESSQSIRSTQKSMRRLIEKRKKRIRCVAQTMERYGILDYSETMKINDPKNNPIKNRWQLRAVDAWKRPLSPQELFAIFAHMAKHRGYKSIATEDLIYELELELGLNDPEKESEKKADERRQVYNALRHLEELRKKYGGETIAQTIHRAVEAGDLRSYRNHDDYEKMIRREDIEEEIEKVLLRQAELGALGLPEEQVSELIDELKACITDQEMPTIDESLFGKCTFYKDELAAPAYSYLYDLYRLYKKLADLNIDGYEVTQEDREKVIEWVEKKIAQGKNLKKITHKDLRKILGLAPEQKIFGVEDERIVKGKKEPRTFVPFFFLADIAKFKELFASIQKHPDALQIFRELAEILQRSKTPQEALDRLRALMAGKGIDTDDRELLELFKNKRSGTRELSHRYILEALPLFLEGYDEKEVQRILGFDDREDYSRYPKSLRHLHLREGNLFEKEENPINNHAVKSLASWALGLIADLSWRYGPFDEIILETTRDALPEKIRKEIDKAMREREKALDKIIGKYKKEFPSIDKRLARKIQLWERQKGLDLYSGKVINLSQLLDGSADIEHIVPQSLGGLSTDYNTIVTLKSVNAAKGNRLPGDWLAGNPDYRERIGMLSEKGLIDWKKRKNLLAQSLDEIYTENTHSKGIRATSYLEALVAQVLKRYYPFPDPELRKNGIGVRMIPGKVTSKTRSLLGIKSKSRETNFHHAEDALILSTLTRGWQNRLHRMLRDNYGKSEAELKELWKKYMPHIEGLTLADYIDEAFRRFMSKGEESLFYRDMFDTIRSISYWVDKKPLSASSHKETVYSSRHEVPTLRKNILEAFDSLNVIKDRHKLTTEEFMKRYDKEIRQKLWLHRIGNTNDESYRAVEERATQIAQILTRYQLMDAQNDKEIDEKFQQALKELITSPIEVTGKLLRKMRFVYDKLNAMQIDRGLVETDKNMLGIHISKGPNEKLIFRRMDVNNAHELQKERSGILCYLNEMLFIFNKKGLIHYGCLRSYLEKGQGSKYIALFNPRFPANPKAQPSKFTSDSKIKQVGIGSATGIIKAHLDLDGHVRSYEVFGTLPEGSIEWFKEESGYGRVEDDPHH

SEQ ID NO: 366 - protein, 1173 aa, Rhodospirillum rubrum
MRPIEPWILGLDIGTDSLGWAVFSCEEKGPPTAKELLGGGVRLFDSGRDAKDHTSRQAERGAFRRARRQTRTWPWRRDRLIALFQAAGLTPPAAETRQIALALRREAVSRPLAPDALWAALLHLAHHRGFRSNRIDKRERAAAKALAKAKPAKATAKATAPAKEADDEAGFWEGAEAALRQRMAASGAPTVGALLADDLDRGQPVRMRYNQSDRDGVVAPTRALIAEELAEIVARQSSAYPGLDWPAVTRLVLDQRPLRSKGAGPCAFLPGEDRALRALPTVQDFIIRQTLANLRLPSTSADEPRPLTDEEHAKALALLSTARFVEWPALRRALGLKRGVKFTAETERNGAKQAARGTAGNLTEAILAPLIPGWSGWDLDRKDRVFSDLWAARQDRSALLALIGDPRGPTRVTEDETAEAVADAIQIVLPTGRASLSAKAARAIAQAMAPGIGYDEAVTLALGLHHSHRPRQERLARLPYYAAALPDVGLDGDPVGPPPAEDDGAAAEAYYGRIGNISVHIALNETRKIVNALLHRHGPILRLVMVETTRELKAGADERKRMIAEQAERERENAEIDVELRKSDRWMANARERRQRVRLARRQNNLCPYTSTPIGHADLLGDAYDIDHVIPLARGGRDSLDNMVLCQSDANKTKGDKTPWEAFHDKPGWIAQRDDFLARLDPQTAKALAWRFADDAGERVARKSAEDEDQGFLPRQLTDTGYIARVALRYLSLVTNEPNAVVATNGRLTGLLRLAWDITPGPAPRDLLPTPRDALRDDTAARRFLDGLTPPPLAKAVEGAVQARLAALGRSRVADAGLADALGLTLASLGGGGKNRADHRHHFIDAAMIAVTTRGLINQINQASGAGRILDLRKWPRTNFEPPYPTFRAEVMKQWDHIHPSIRPAHRDGGSLHAATVFGVRNRPDARVLVQRKPVEKLFLDANAKPLPADKIAEIIDGFASPRMAKRFKALLARYQAAHPEVPPALAALAVARDPAFGPRGMTANTVIAGRSDGDGEDAGLITPFRANPKAAVRTMGNAVYEVWEIQVKGRPRWTHRVLTRFDRTQPAPPPPPENARLVMRLRRGDLVYWPLESGDRLFLVKKMAVDGRLALWPARLATGKATALYAQLSCPNINLNGDQGYCVQSAEGIRKEKIRTTSCTALGRLRLSKKAT

SEQ ID NO: 367 - protein, 1021 aa, Clostridium cellulolyticum
MKYTLGLDVGIASVGWAVIDKDNNKIIDLGVRCFDKAEESKTGESLATARRIARGMRRRISRRSQRLRLVKKLFVQYEIIKDSSEFNRIFDTSRDGWKDPWELRYNALSRILKPYELVQVLTHITKRRGFKSNRKEDLSTTKEGVVITSIKNNSEMLRTKNYRTIGEMIFMETPENSNKRNKVDEYIHTIAREDLLNEIKYIFSIQRKLGSPFVTEKLEHDFLNIWEFQRPFASGDSILSKVGKCTLLKEELRAPTSCYTSEYFGLLQSINNLVLVEDNNTLTLNNDQRAKIIEYAHFKNEIKYSEIRKLLDIEPEILFKAHNLTHKNPSGNNESKKFYEMKSYHKLKSTLPTDIWGKLHSNKESLDNLFYCLTVYKNDNEIKDYLQANNLDYLIEYIAKLPTFNKFKHLSLVAMKRIIPFMEKGYKYSDACNMAELDFTGSSKLEKCNKLTVEPIIENVTNPVVIRALTQARKVINAIIQKYGLPYMVNIELAREAGMTRQDRDNLKKEHENNRKAREKISDLIRQNGRVASGLDILKWRLWEDQGGRCAYSGKPIPVCDLLNDSLTQIDHIYPYSRSMDDSYMNKVLVLTDENQNKRSYTPYEVWGSTEKWEDFEARIYSMHLPQSKEKRLLNRNFITKDLDSFISRNLNDTRYISRFLKNYIESYLQFSNDSPKSCVVCVNGQCTAQLRSRWGLNKNREESDLHHALDAAVIACADRKIIKEITNYYNERENHNYKVKYPLPWHSFRQDLMETLAGVFISRAPRRKITGPAHDETIRSPKHFNKGLTSVKIPLTTVTLEKLETMVKNTKGGISDKAVYNVLKNRLIEHNNKPLKAFAEKIYKPLKNGTNGAIIRSIRVETPSYTGVFRNEGKGISDNSLMVRVDVFKKKDKYYLVPIYVAHMIKKELPSKAIVPLKPESQWELIDSTHEFLFSLYQNDYLVIKTKKGITEGYYRSCHRGTGSLSLMPHFANNKNVKIDIGVRTAISIEKYNVDILGNKSIVKGEPRRGMEKYNSFKSN

SEQ ID NO: 368 - protein, 1024 aa, Helicobacter mustelae
MIRTLGIDIGIASIGWAVIEGEYTDKGLENKEIVASGVRVFTKAENPKNKESLALPRTLARSARRRNARKKGRIQQVKHYLSKALGLDLECFVQGEKLATLFQTSKDFLSPWELRERALYRVLDKEELARVILHIAKRRGYDDITYGVEDNDSGKIKKAIAENSKRIKEEQCKTIGEMMYKLYFQKSLNVRNKKESYNRCVGRSELREELKTIFQIQQELKSPWVNEELIYKLLGNPDAQSKQEREGLIFYQRPLKGFGDKIGKCSHIKKGENSPYRACKHAPSAEEFVALTKSINFLKNLTNRHGLCFSQEDMCVYLGKILQEAQKNEKGLTYSKLKLLLDLPSDFEFLGLDYSGKNPEKAVFLSLPSTFKLNKITQDRKTQDKIANILGANKDWEAILKELESLQLSKEQIQTIKDAKLNFSKHINLSLEALYHLLPLMREGKRYDEGVEILQERGIFSKPQPKNRQLLPPLSELAKEESYFDIPNPVLRRALSEFRKVVNALLEKYGGFHYFHIELTRDVCKAKSARMQLEKINKKNKSENDAASQLLEVLGLPNTYNNRLKCKLWKQQEEYCLYSGEKITIDHLKDQRALQIDHAFPLSRSLDDSQSNKVLCLTSSNQEKSNKTPYEWLGSDEKKWDMYVGRVYSSNFSPSKKRKLTQKNFKERNEEDFLARNLVDTGYIGRVTKEYIKHSLSFLPLPDGKKEHIRIISGSMTSTMRSFWGVQEKNRDHHLHHAQDAIIIACIEPSMIQKYTTYLKDKETHRLKSHQKAQILREGDHKLSLRWPMSNFKDKIQESIQNIIPSHHVSHKVTGELHQETVRTKEFYYQAFGGEEGVKKALKFGKIREINQGIVDNGAMVRVDIFKSKDKGKFYAVPIYTYDFAIGKLPNKAIVQGKKNGIIKDWLEMDENYEFCFSLFKNDCIKIQTKEMQEAVLAIYKSTNSAKATIELEHLSKYALKNEDEEKMFTDTDKEKNKTMTRESCGIQGLKVFQKVKLSVLGEVLEHKPRNRQNIALKTTPKHV

SEQ ID NO: 369 - protein, 1092 aa, Ilyobacter polytropus
MKYSIGLDIGIASVGWSVINKDKERIEDMGVRIFQKAENPKDGSSLASSRREKRGSRRRNRRKKHRLDRIKNILCESGLVKKNEIEKIYKNAYLKSPWELRAKSLEAKISNKEIAQILLHIAKRRGFKSFRKTDRNADDTGKLLSGIQENKKIMEEKGYLTIGDMVAKDPKFNTHVRNKAGSYLFSFSRKLLEDEVRKIQAKQKELGNTHFTDDVLEKYIEVFNSQRNFDEGPSKPSPYYSEIGQIAKMIGNCTFESSEKRTAKNTWSGERFVFLQKLNNFRIVGLSGKRPLTEEERDIVEKEVYLKKEVRYEKLRKILYLKEEERFGDLNYSKDEKQDKKTEKTKFISLIGNYTIKKLNLSEKLKSEIEEDKSKLDKIIEILTFNKSDKTIESNLKKLELSREDIEILLSEEFSGTLNLSLKAIKKILPYLEKGLSYNEACEKADYDYKNNGIKFKRGELLPVVDKDLIANPVVLRAISQTRKVVNAIIRKYGTPHTIHVEVARDLAKSYDDRQTIIKENKKRELENEKTKKFISEEFGIKNVKGKLLLKYRLYQEQEGRCAYSRKELSLSEVILDESMTDIDHIIPYSRSMDDSYSNKVLVLSGENRKKSNLLPKEYFDRQGRDWDTFVLNVKAMKIHPRKKSNLLKEKFTREDNKDWKSRALNDTRYISRFVANYLENALEYRDDSPKKRVFMIPGQLTAQLRARWRLNKVRENGDLHHALDAAVVAVTDQKAINNISNISRYKELKNCKDVIPSIEYHADEETGEVYFEEVKDTRFPMPWSGFDLELQKRLESENPREEFYNLLSDKRYLGWFNYEEGFIEKLRPVFVSRMPNRGVKGQAHQETIRSSKKISNQIAVSKKPLNSIKLKDLEKMQGRDTDRKLYEALKNRLEEYDDKPEKAFAEPFYKPTNSGKRGPLVRGIKVEEKQNVGVYVNGGQASNGSMVRIDVFRKNGKFYTVPIYVHQTLLKELPNRAINGKPYKDWDLIDGSFEFLYSFYPNDLIEIEFGKSKSIKNDNKLTKTEIPEVNLSEVLGYYRGMDTSTGAATIDTQDGKIQMRIGIKTVKNIKKYQVDVLGNVYKVKREKRQTF

SEQ ID NO: 370 - protein, 1179 aa, Sphaerochaeta globosa
MSKKVSRRYEEQAQEICQRLGSRPYSIGLDLGVGSIGVAVAAYDPIKKQPSDLVFVSSRIFIPSTGAAERRQKRGQRNSLRHRANRLKFLWKLLAERNLMLSYSEQDVPDPARLRFEDAVVRANPYELRLKGLNEQLTLSELGYALYHIANHRGSSSVRTFLDEEKSSDDKKLEEQQAMTEQLAKEKGISTFIEVLTAFNTNGLIGYRNSESVKSKGVPVPTRDIISNEIDVLLQTQKQFYQEILSDEYCDRIVSAILFENEKIVPEAGCCPYFPDEKKLPRCHFLNEERRLWEAINNARIKMPMQEGAAKRYQSASFSDEQRHILFHIARSGTDITPKLVQKEFPALKTSIIVLQGKEKAIQKIAGFRFRRLEEKSFWKRLSEEQKDDFFSAWTNTPDDKRLSKYLMKHLLLTENEVVDALKTVSLIGDYGPIGKTATQLLMKHLEDGLTYTEALERGMETGEFQELSVWEQQSLLPYYGQILTGSTQALMGKYWHSAFKEKRDSEGFFKPNTNSDEEKYGRIANPVVHQTLNELRKLMNELITILGAKPQEITVELARELKVGAEKREDIIKQQTKQEKEAVLAYSKYCEPNNLDKRYIERFRLLEDQAFVCPYCLEHISVADIAAGRADVDHIFPRDDTADNSYGNKVVAHRQCNDIKGKRTPYAAFSNTSAWGPIMHYLDETPGMWRKRRKFETNEEEYAKYLQSKGFVSRFESDNSYIAKAAKEYLRCLFNPNNVTAVGSLKGMETSILRKAWNLQGIDDLLGSRHWSKDADTSPTMRKNRDDNRHHGLDAIVALYCSRSLVQMINTMSEQGKRAVEIEAMIPIPGYASEPNLSFEAQRELFRKKILEFMDLHAFVSMKTDNDANGALLKDTVYSILGADTQGEDLVFVVKKKIKDIGVKIGDYEEVASAIRGRITDKQPKWYPMEMKDKIEQLQSKNEAALQKYKESLVQAAAVLEESNRKLIESGKKPIQLSEKTISKKALELVGGYYYLISNNKRTKTFVVKEPSNEVKGFAFDTGSNLCLDFYHDAQGKLCGEIIRKIQAMNPSYKPAYMKQGYSLYVRLYQGDVCELRASDLTEAESNLAKTTHVRLPNAKPGRTFVIIITFTEMGSGYQIYFSNLAKSKKGQDTSFTLTTIKNYDVRKVQLSSAGLVRYVSPLLVDKIEKDEVALCGE

SEQ ID NO: 371 - protein, 1054 aa, Staphylococcus lugdunensis
MNQKFILGLDIGITSVGYGLIDYETKNIIDAGVRLFPEANVENNEGRRSKRGSRRLKRRRIHRLERVKKLLEDYNLLDQSQIPQSTNPYAIRVKGLSEALSKDELVIALLHIAKRRGIHKIDVIDSNDDVGNELSTKEQLNKNSKLLKDKFVCQIQLERMNEGQVRGEKNRFKTADIIKEIIQLLNVQKNFHQLDENFINKYIELVEMRREYFEGPGKGSPYGWEGDPKAWYETLMGHCTYFPDELRSVKYAYSADLFNALNDLNNLVIQRDGLSKLEYHEKYHIIENVFKQKKKPTLKQIANEINVNPEDIKGYRITKSGKPQFTEFKLYHDLKSVLFDQSILENEDVLDQIAEILTIYQDKDSIKSKLTELDILLNEEDKENIAQLTGYTGTHRLSLKCIRLVLEEQWYSSRNQMEIFTHLNIKPKKINLTAANKIPKAMIDEFILSPVVKRTFGQAINLINKIIEKYGVPEDIIIELARENNSKDKQKFINEMQKKNENTRKRINEIIGKYGNQNAKRLVEKIRLHDEQEGKCLYSLESIPLEDLLNNPNHYEVDHIIPRSVSFDNSYHNKVLVKQSENSKKSNLTPYQYFNSGKSKLSYNQFKQHILNLSKSQDRISKKKKEYLLEERDINKFEVQKEFINRNLVDTRYATRELTNYLKAYFSANNMNVKVKTINGSFTDYLRKVWKFKKERNHGYKHHAEDALIIANADFLFKENKKLKAVNSVLEKPEIESKQLDIQVDSEDNYSEMFIIPKQVQDIKDFRNFKYSHRVDKKPNRQLINDTLYSTRKKDNSTYIVQTIKDIYAKDNTTLKKQFDKSPEKFLMYQHDPRTFEKLEVIMKQYANEKNPLAKYHEETGEYLTKYSKKNNGPIVKSLKYIGNKLGSHLDVTHQFKSSTKKLVKLSIKPYRFDVYLTDKGYKFITISYLDVLKKDNYYYIPEQKYDKLKLGKAIDKNAKFIASFYKNDLIKLDGEIYKIIGVNSDTRNMIELDLPDIRYKEYCELNNIKGEPRIKKTIGKKVNSIEKLTTDVLGNVFTNTQYTKPQLLFKRGN

SEQ ID NO: 372 - protein, 1061 aa, Treponema sp.
MIMKLEKWRLGLDLGTNSIGWSVFSLDKDNSVQDLIDMGVRIFSDGRDPKTKEPLAVARRTARSQRKLIYRRKLRRKQVFKFLQEQGLFPKTKEECMTLKSLNPYELRIKALDEKLEPYELGRALFNLAVRRGFKSNRKDGSREEVSEKKSPDEIKTQADMQTHLEKAIKENGCRTITEFLYKNQGENGGIRFAPGRMTYYPTRKMYEEEFNLIRSKQEKYYPQVDWDDIYKAIFYQRPLKPQQRGYCIYENDKERTFKAMPCSQKLRILQDIGNLAYYEGGSKKRVELNDNQDKVLYELLNSKDKVTFDQMRKALCLADSNSFNLEENRDFLIGNPTAVKMRSKNRFGKLWDEIPLEEQDLIIETIITADEDDAVYEVIKKYDLTQEQRDFIVKNTILQSGTSMLCKEVSEKLVKRLEEIADLKYHEAVESLGYKFADQTVEKYDLLPYYGKVLPGSTMEIDLSAPETNPEKHYGKISNPTVHVALNQTRVVVNALIKEYGKPSQIAIELSRDLKNNVEKKAEIARKQNQRAKENIAINDTISALYHTAFPGKSFYPNRNDRMKYRLWSELGLGNKCIYCGKGISGAELFTKEIEIEHILPFSRTLLDAESNLTVAHSSCNAFKAERSPFEAFGTNPSGYSWQEIIQRANQLKNTSKKNKFSPNAMDSFEKDSSFIARQLSDNQYIAKAALRYLKCLVENPSDVWTTNGSMTKLLRDKWEMDSILCRKFTEKEVALLGLKPEQIGNYKKNRFDHRHHAIDAVVIGLTDRSMVQKLATKNSHKGNRIEIPEFPILRSDLIEKVKNIVVSFKPDHGAEGKLSKETLLGKIKLHGKETFVCRENIVSLSEKNLDDIVDEIKSKVKDYVAKHKGQKIEAVLSDFSKENGIKKVRCVNRVQTPIEITSGKISRYLSPEDYFAAVIWEIPGEKKTFKAQYIRRNEVEKNSKGLNVVKPAVLENGKPHPAAKQVCLLHKDDYLEFSDKGKMYFCRIAGYAATNNKLDIRPVYAVSYCADWINSTNETMLTGYWKPTPTQNWVSVNVLFDKQKARLVTVSPIGRVFRK

SEQ ID NO: 373 - protein, 1011 aa, synthetic construct
MSSKAIDSLEQLDLFKPQEYTLGLDLGIKSIGWAILSGERIANAGVYLFETAEELNSTGNKLISKAAERGRKRRIRRMLDRKARRGRHIRYLLEREGLPTDELEEVVVHQSNRTLWDVRAEAVERKLTKQELAAVLFHLVRHRGYFPNTKKLPPDDESDSADEEQGKINRATSRLREELKASDCKTIGQFLAQNRDRQRNREGDYSNLMARKLVFEEALQILAFQRKQGHELSKDFEKTYLDVLMGQRSGRSPKLGNCSLIPSELRAPSSAPSTEWFKFLQNLGNLQISNAYREEWSIDAPRRAQIIDACSQRSTSSYWQIRRDFQIPDEYRFNLVNYERRDPDVDLQEYLQQQERKTLANFRNWKQLEKIIGTGHPIQTLDEAARLITLIKDDEKLSDQLADLLPEASDKAITQLCELDFTTAAKISLEAMYRILPHMNQGMGFFDACQQESLPEIGVPPAGDRVPPFDEMYNPVVNRVLSQSRKLINAVIDEYGMPAKIRVELARDLGKGRELRERIKLDQLDKSKQNDQRAEDFRAEFQQAPRGDQSLRYRLWKEQNCTCPYSGRMIPVNSVLSEDTQIDHILPISQSFDNSLSNKVLCFTEENAQKSNRTPFEYLDAADFQRLEAISGNWPEAKRNKLLHKSFGKVAEEWKSRALNDTRYLTSALADHLRHHLPDSKIQTVNGRITGYLRKQWGLEKDRDKHTHHAVDAIVVACTTPAIVQQVTLYHQDIRRYKKLGEKRPTPWPETFRQDVLDVEEEIFITRQPKKVSGGIQTKDTLRKHRSKPDRQRVALTKVKLADLERLVEKDASNRNLYEHLKQCLEESGDQPTKAFKAPFYMPSGPEAKQRPILSKVTLLREKPEPPKQLTELSGGRRYDSMAQGRLDIYRYKPGGKRKDEYRVVLQRMIDLMRGEENVHVFQKGVPYDQGPEIEQNYTFLFSLYFDDLVEFQRSADSEVIRGYYRTFNIANGQLKISTYLEGRQDFDFFGANRLAHFAKVQVNLLGKVIK

SEQ ID NO: 374 - protein, 1029 aa, Alicycliphilus denitrificans
MRSLRYRLALDLGSTSLGWALFRLDACNRPTAVIKAGVRIFSDGRNPKDGSSLAVTRRAARAMRRRRDRLLKRKTRMQAKLVEHGFFPADAGKRKALEQLNPYALRAKGLQEALLPGEFARALFHINQRRGFKSNRKTDKKDNDSGVLKKAIGQLRQQMAEQGSRTVGEYLWTRLQQGQGVRARYREKPYTTEEGKKRIDKSYDLYIDRAMIEQEFDALWAAQAAFNPTLFHEAARADLKDTLLHQRPLRPVKPGRCTLLPEEERAPLALPSTQRFRIHQEVNHLRLLDENLREVALTLAQRDAVVTALETKAKLSFEQIRKLLKLSGSVQFNLEDAKRTELKGNATSAALARKELFGAAWSGFDEALQDEIVWQLVTEEGEGALIAWLQTHTGVDEARAQAIVDVSLPEGYGNLSRKALARIVPALRAAVITYDKAVQAAGFDHHSQLGFEYDASEVEDLVHPETGEIRSVFKQLPYYGKALQRHVAFGSGKPEDPDEKRYGKIANPTVHIGLNQVRMVVNALIRRYGRPTEVVIELARDLKQSREQKVEAQRRQADNQRRNARIRRSIAEVLGIGEERVRGSDIQKWICWEELSFDAADRRCPYSGVQISAAMLLSDEVEVEHILPFSKTLDDSLNNRTVAMRQANRIKRNRTPWDARAEFEAQGWSYEDILQRAERMPLRKRYRFAPDGYERWLGDDKDFLARALNDTRYLSRVAAEYLRLVCPGTRVIPGQLTALLRGKFGLNDVLGLDGEKNRNDHRHHAVDACVIGVTDQGLMQRFATASAQARGDGLTRLVDGMPMPWPTYRDHVERAVRHIWVSHRPDHGFEGAMMEETSYGIRKDGSIKQRRKADGSAGREISNLIRIHEATQPLRHGVSADGQPLAYKGYVGGSNYCIEITVNDKGKWEGEVISTFRAYGVVRAGGMGRLRNPHEGQNGRKLIMRLVIGDSVRLEVDGAERTMRIVKISGSNGQIFMAPIHEANVDARNTDKQDAFTYTSKYAGSLQKAKTRRVTISPIGEVRDPGFKG

SEQ ID NO: 375 - protein, 1168 aa, Azospirillum sp.
MARPAFRAPRREHVNGWTPDPHRISKPFFILVSWHLLSRVVIDSSSGCFPGTSRDHTDKFAEWECAVQPYRLSFDLGTNSIGWGLLNLDRQGKPREIRALGSRIFSDGRDPQDKASLAVARRLARQMRRRRDRYLTRRTRLMGALVRFGLMPADPAARKRLEVAVDPYLARERATRERLEPFEIGRALFHLNQRRGYKPVRTATKPDEEAGKVKEAVERLEAAIAAAGAPTLGAWFAWRKTRGETLRARLAGKGKEAAYPFYPARRMLEAEFDTLWAEQARHHPDLLTAEAREILRHRIFHQRPLKPPPVGRCTLYPDDGRAPRALPSAQRLRLFQELASLRVIHLDLSERPLTPAERDRIVAFVQGRPPKAGRKPGKVQKSVPFEKLRGLLELPPGTGFSLESDKRPELLGDETGARIAPAFGPGWTALPLEEQDALVELLLTEAEPERAIAALTARWALDEATAAKLAGATLPDFHGRYGRRAVAELLPVLERETRGDPDGRVRPIRLDEAVKLLRGGKDHSDFSREGALLDALPYYGAVLERHVAFGTGNPADPEEKRVGRVANPTVHIALNQLRHLVNAILARHGRPEEIVIELARDLKRSAEDRRREDKRQADNQKRNEERKRLILSLGERPTPRNLLKLRLWEEQGPVENRRCPYSGETISMRMLLSEQVDIDHILPFSVSLDDSAANKVVCLREANRIKRNRSPWEAFGHDSERWAGILARAEALPKNKRWRFAPDALEKLEGEGGLRARHLNDTRHLSRLAVEYLRCVCPKVRVSPGRLTALLRRRWGIDAILAEADGPPPEVPAETLDPSPAEKNRADHRHHALDAVVIGCIDRSMVQRVQLAAASAEREAAAREDNIRRVLEGFKEEPWDGFRAELERRARTIVVSHRPEHGIGGALHKETAYGPVDPPEEGFNLVVRKPIDGLSKDEINSVRDPRLRRALIDRLAIRRRDANDPATALAKAAEDLAAQPASRGIRRVRVLKKESNPIRVEHGGNPSGPRSGGPFHKLLLAGEVHHVDVALRADGRRWVGHWVTLFEAHGGRGADGAAAPPRLGDGERFLMRLHKGDCLKLEHKGRVRVMQVVKLEPSSNSVVVVEPHQVKTDRSKHVKISCDQLRARGARRVTVDPLGRVRVHAPGARVGIGGDAGRTAMEPAEDIS

SEQ ID NO: 376 - protein, 1064 aa, Bradyrhizobium sp.
MKRTSLRAYRLGVDLGANSLGWFVVWLDDHGQPEGLGPGGVRIFPDGRNPQSKQSNAAGRRLARSARRRRDRYLQRRGKLMGLLVKHGLMPADEPARKRLECLDPYGLRAKALDEVLPLHHVGRALFHLNQRRGLFANRAIEQGDKDASAIKAAAGRLQTSMQACGARTLGEFLNRRHQLRATVRARSPVGGDVQARYEFYPTRAMVDAEFEAIWAAQAPHHPTMTAEAHDTIREAIFSQRAMKRPSIGKCSLDPATSQDDVDGFRCAWSHPLAQRFRIWQDVRNLAVVETGPTSSRLGKEDQDKVARALLQTDQLSFDEIRGLLGLPSDARFNLESDRRDHLKGDATGAILSARRHFGPAWHDRSLDRQIDIVALLESALDEAAIIASLGTTHSLDEAAAQRALSALLPDGYCRLGLRAIKRVLPLMEAGRTYAEAASAAGYDHALLPGGKLSPTGYLPYYGQWLQNDVVGSDDERDTNERRWGRLPNPTVHIGIGQLRRVVNELIRWHGPPAEITVELTRDLKLSPRRLAELEREQAENQRKNDKRTSLLRKLGLPASTHNLLKLRLWDEQGDVASECPYTGEAIGLERLVSDDVDIDHLIPFSISWDDSAANKVVCMRYANREKGNRTPFEAFGHRQGRPYDWADIAERAARLPRGKRWRFGPGARAQFEELGDFQARLLNETSWLARVAKQYLAAVTHPHRIHVLPGRLTALLRATWELNDLLPGSDDRAAKSRKDHRHHAIDALVAALTDQALLRRMANAHDDTRRKIEVLLPWPTFRIDLETRLKAMLVSHKPDHGLQARLHEDTAYGTVEHPETEDGANLVYRKTFVDISEKEIDRIRDRRLRDLVRAHVAGERQQGKTLKAAVLSFAQRRDIAGHPNGIRHVRLTKSIKPDYLVPIRDKAGRIYKSYNAGENAFVDILQAESGRWIARATTVFQANQANESHDAPAAQPIMRVFKGDMLRIDHAGAEKFVKIVRLSPSNNLLYLVEHHQAGVFQTRHDDPEDSFRWLFASFDKLREWNAELVRIDTLGQPWRRKRGLETGSEDATRIGWTRPKKWP

SEQ ID NO: 377 - protein, 1037 aa, Parvibaculum lavamentivorans
MERIFGFDIGTTSIGFSVIDYSSTQSAGNIQRLGVRIFPEARDPDGTPLNQQRRQKRMMRRQLRRRRIRRKALNETLHEAGFLPAYGSADWPVVMADEPYELRRRGLEEGLSAYEFGRAIYHLAQHRHFKGRELEESDTPDPDVDDEKEAANERAATLKALKNEQTTLGAWLARRPPSDRKRGIHAHRNVVAEEFERLWEVQSKFHPALKSEEMRARISDTIFAQRPVFWRKNTLGECRFMPGEPLCPKGSWLSQQRRMLEKLNNLAIAGGNARPLDAEERDAILSKLQQQASMSWPGVRSALKALYKQRGEPGAEKSLKFNLELGGESKLLGNALEAKLADMFGPDWPAHPRKQEIRHAVHERLWAADYGETPDKKRVIILSEKDRKAHREAAANSFVADFGITGEQAAQLQALKLPTGWEPYSIPALNLFLAELEKGERFGALVNGPDWEGWRRTNFPHRNQPTGEILDKLPSPASKEERERISQLRNPTVVRTQNELRKVVNNLIGLYGKPDRIRIEVGRDVGKSKREREEIQSGIRRNEKQRKKATEDLIKNGIANPSRDDVEKWILWKEGQERCPYTGDQIGFNALFREGRYEVEHIWPRSRSFDNSPRNKTLCRKDVNIEKGNRMPFEAFGHDEDRWSAIQIRLQGMVSAKGGTGMSPGKVKRFLAKTMPEDFAARQLNDTRYAAKQILAQLKRLWPDMGPEAPVKVEAVTGQVTAQLRKLWTLNNILADDGEKTRADHRHHAIDALTVACTHPGMTNKLSRYWQLRDDPRAEKPALTPPWDTIRADAEKAVSEIVVSHRVRKKVSGPLHKETTYGDTGTDIKTKSGTYRQFVTRKKIESLSKGELDEIRDPRIKEIVAAHVAGRGGDPKKAFPPYPCVSPGGPEIRKVRLTSKQQLNLMAQTGNGYADLGSNHHIAIYRLPDGKADFEIVSLFDASRRLAQRNPIVQRTRADGASFVMSLAAGEAIMIPEGSKKGIWIVQGVWASGQVVLERDTDADHSTTTRPMPNPILKDDAKKVSIDPIGRVRPSND

SEQ ID NO: 378 - protein, 1218 aa, Prevotella timonensis
MNKRILGLDTGTNSLGWAVVDWDEHAQSYELIKYGDVIFQEGVKIEKGIESSKAAERSGYKAIRKQYFRRRLRKIQVLKVLVKYHLCPYLSDDDLRQWHLQKQYPKSDELMLWQRTSDEEGKNPYYDRHRCLHEKLDLTVEADRYTLGRALYHLTQRRGFLSNRLDTSADNKEDGVVKSGISQLSTEMEEAGCEYLGDYFYKLYDAQGNKVRIRQRYTDRNKHYQHEFDAICEKQELSSELIEDLQRAIFFQLPLKSQRHGVGRCTFERGKPRCADSHPDYEEFRMLCFVNNIQVKGPHDLELRPLTYEEREKIEPLFFRKSKPNFDFEDIAKALAGKKNYAWIHDKEERAYKFNYRMTQGVPGCPTIAQLKSIFGDDWKTGIAETYTLIQKKNGSKSLQEMVDDVWNVLYSFSSVEKLKEFAHHKLQLDEESAEKFAKIKLSHSFAALSLKAIRKFLPFLRKGMYYTHASFFANIPTIVGKEIWNKEQNRKYIMENVGELVFNYQPKHREVQGTIEMLIKDFLANNFELPAGATDKLYHPSMIETYPNAQRNEFGILQLGSPRTNAIRNPMAMRSLHILRRVVNQLLKESIIDENTEVHVEYARELNDANKRRAIADRQKEQDKQHKKYGDEIRKLYKEETGKDIEPTQTDVLKFQLWEEQNHHCLYTGEQIGITDFIGSNPKFDIEHTIPQSVGGDSTQMNLTLCDNRFNREVKKAKLPTELANHEEILTRIEPWKNKYEQLVKERDKQRTFAGMDKAVKDIRIQKRHKLQMEIDYWRGKYERFTMTEVPEGFSRRQGTGIGLISRYAGLYLKSLFHQADSRNKSNVYVVKGVATAEFRKMWGLQSEYEKKCRDNHSHHCMDAITIACIGKREYDLMAEYYRMEETFKQGRGSKPKFSKPWATFTEDVLNIYKNLLVVHDTPNNMPKHTKKYVQTSIGKVLAQGDTARGSLHLDTYYGAIERDGEIRYVVRRPLSSFTKPEELENIVDETVKRTIKEAIADKNFKQAIAEPIYMNEEKGILIKKVRCFAKSVKQPINIRQHRDLSKKEYKQQYHVMNENNYLLAIYEGLVKNKVVREFEIVSYIEAAKYYKRSQDRNIFSSIVPTHSTKYGLPLKTKLLMGQLVLMFEENPDEIQVDNTKDLVKRLYKVVGIEKDGRIKFKYHQEARKEGLPIFSTPYKNNDDYAPIFRQSINNINILVDGIDFTIDILGKVTLKE

SEQ ID NO: 379 - protein, 1088 aa, Bacillus smithii
MNYKMGLDIGIASVGWAVINLDLKRIEDLGVRIFDKAEHPQNGESLALPRRIARSARRRLRRRKHRLERIRRLLVSENVLTKEEMNLLFKQKKQIDVWQLRVDALERKLNNDELARVLLHLAKRRGFKSNRKSERNSKESSEFLKNIEENQSILAQYRSVGEMIVKDSKFAYHKRNKLDSYSNMIARDDLEREIKLIFEKQREFNNPVCTERLEEKYLNIWSSQRPFASKEDIEKKVGFCTFEPKEKRAPKATYTFQSFIVWEHINKLRLVSPDETRALTEIERNLLYKQAFSKNKMTYYDIRKLLNLSDDIHFKGLLYDPKSSLKQIENIRFLELDSYHKIRKCIENVYGKDGIRMFNETDIDTFGYALTIFKDDEDIVAYLQNEYITKNGKRVSNLANKVYDKSLIDELLNLSFSKFAHLSMKAIRNILPYMEQGEIYSKACELAGYNFTGPKKKEKALLLPVIPNIANPVVMRALTQSRKVVNAIIKKYGSPVSIHIELARDLSHSFDERKKIQKDQTENRKKNETAIKQLIEYELTKNPTGLDIVKFKLWSEQQGRCMYSLKPIELERLLEPGYVEVDHILPYSRSLDDSYANKVLVLTKENREKGNHTPVEYLGLGSERWKKFEKFVLANKQFSKKKKQNLLRLRYEETEEKEFKERNLNDTRYISKFFANFIKEHLKFADGDGGQKVYTINGKITAHLRSRWDFNKNREESDLHHAVDAVIVACATQGMIKKITEFYKAREQNKESAKKKEPIFPQPWPHFADELKARLSKFPQESIEAFALGNYDRKKLESLRPVFVSRMPKRSVTGAAHQETLRRCVGIDEQSGKIQTAVKTKLSDIKLDKDGHFPMYQKESDPRTYEAIRQRLLEHNNDPKKAFQEPLYKPKKNGEPGPVIRTVKIIDTKNKVVHLDGSKTVAYNSNIVRTDVFEKDGKYYCVPVYTMDIMKGTLPNKAIEANKPYSEWKEMTEEYTFQFSLFPNDLVRIVLPREKTIKTSTNEEIIIKDIFAYYKTIDSATGGLELISHDRNFSLRGVGSKTLKRFEKYQVDVLGNIHKVKGEKRVGLAAPTNQKKGKTVDSLQSVSD

SEQ ID NO: 380 - protein, 1035 aa, Candidatus Puniceispirillum marinum
MRRLGLDLGTNSIGWCLLDLGDDGEPVSIFRTGARIFSDGRDPKSLGSLKATRREARLTRRRRDRFIQRQKNLINALVKYGLMPADEIQRQALAYKDPYPIRKKALDEAIDPYEMGRAIFHINQRRGFKSNRKSADNEAGVVKQSIADLEMKLGEAGARTIGEFLADRQATNDTVRARRLSGTNALYEFYPDRYMLEQEFDTLWAKQAAFNPSLYIEAARERLKEIVFFQRKLKPQEVGRCIFLSDEDRISKALPSFQRFRIYQELSNLAWIDHDGVAHRITASLALRDHLFDELEHKKKLTFKAMRAILRKQGVVDYPVGFNLESDNRDHLIGNLTSCIMRDAKKMIGSAWDRLDEEEQDSFILMLQDDQKGDDEVRSILTQQYGLSDDVAEDCLDVRLPDGHGSLSKKAIDRILPVLRDQGLIYYDAVKEAGLGEANLYDPYAALSDKLDYYGKALAGHVMGASGKFEDSDEKRYGTISNPTVHIALNQVRAVVNELIRLHGKPDEVVIEIGRDLPMGADGKRELERFQKEGRAKNERARDELKKLGHIDSRESRQKFQLWEQLAKEPVDRCCPFTGKMMSISDLFSDKVEIEHLLPFSLTLDDSMANKTVCFRQANRDKGNRAPFDAFGNSPAGYDWQEILGRSQNLPYAKRWRFLPDAMKRFEADGGFLERQLNDTRYISRYTTEYISTIIPKNKIWVVTGRLTSLLRGFWGLNSILRGHNTDDGTPAKKSRDDHRHHAIDAIVVGMTSRGLLQKVSKAARRSEDLDLTRLFEGRIDPWDGFRDEVKKHIDAIIVSHRPRKKSQGALHNDTAYGIVEHAENGASTVVHRVPITSLGKQSDIEKVRDPLIKSALLNETAGLSGKSFENAVQKWCADNSIKSLRIVETVSIIPITDKEGVAYKGYKGDGNAYMDIYQDPTSSKWKGEIVSRFDANQKGFIPSWQSQFPTARLIMRLRINDLLKLQDGEIEEIYRVQRLSGSKILMAPHTEANVDARDRDKNDTFKLTSKSPGKLQSASARKVHISPTGLIREG

SEQ ID NO: 381 - protein, 1153 aa, Barnesiella intestinihominis
MKNILGLDLGLSSIGWSVIRENSEEQELVAMGSRVVSLTAAELSSFTQGNGVSINSQRTQKRTQRKGYDRYQLRRTLLRNKLDTLGMLPDDSLSYLPKLQLWGLRAKAVTQRIELNELGRVLLHLNQKRGYKSIKSDFSGDKKITDYVKTVKTRYDELKEMRLTIGELFFRRLTENAFFRCKEQVYPRQAYVEEFDCIMNCQRKFYPDILTDETIRCIRDEIIYYQRPLKSCKYLVSRCEFEKRFYLNAAGKKTEAGPKVSPRTSPLFQVCRLWESINNIVVKDRRNEIVFISAEQRAALFDFLNTHEKLKGSDLLKLLGLSKTYGYRLGEQFKTGIQGNKTRVEIERALGNYPDKKRLLQFNLQEESSSMVNTETGEIIPMISLSFEQEPLYRLWHVLYSIDDREQLQSVLRQKFGIDDDEVLERLSAIDLVKAGFGNKSSKAIRRILPFLQLGMNYAEACEAAGYNHSNNYTKAENEARALLDRLPAIKKNELRQPVVEKILNQMVNVVNALMEKYGRFDEIRVELARELKQSKEERSNTYKSINKNQRENEQIAKRIVEYGVPTRSRIQKYKMWEESKHCCIYCGQPVDVGDFLRGFDVEVEHIIPKSLYFDDSFANKVCSCRSCNKEKNNRTAYDYMKSKGEKALSDYVERVNTMYTNNQISKTKWQNLLTPVDKISIDFIDRQLRESQYIARKAKEILTSICYNVTATSGSVTSFLRHVWGWDTVLHDLNFDRYKKVGLTEVIEVNHRGSVIRREQIKDWSKRFDHRHHAIDALTIACTKQAYIQRLNNLRAEEGPDFNKMSLERYIQSQPHFSVAQVREAVDRILVSFRAGKRAVTPGKRYIRKNRKRISVQSVLIPRGALSEESVYGVIHVWEKDEQGHVIQKQRAVMKYPITSINREMLDKEKVVDKRIHRILSGRLAQYNDNPKEAFAKPVYIDKECRIPIRTVRCFAKPAINTLVPLKKDDKGNPVAWVNPGNNHHVAIYRDEDGKYKERTVTFWEAVDRCRVGIPAIVTQPDTIWDNILQRNDISENVLESLPDVKWQFVLSLQQNEMFILGMNEEDYRYAMDQQDYALLNKYLYRVQKLSKSDYSFRYHTETSVEDKYDGKPNLKLSMQMGKLKRVSIKSLLGLNPHKVHISVLGEIKEIS

SEQ ID NO: 382 - protein, 1062 aa, Ralstonia syzygii
MAEKQHRWGLDIGTNSIGWAVIALIEGRPAGLVATGSRIFSDGRNPKDGSSLAVERRGPRQMRRRRDRYLRRRDRFMQALINVGLMPGDAAARKALVTENPYVLRQRGLDQALTLPEFGRALFHLNQRRGFQSNRKTDRATAKESGKVKNAIAAFRAGMGNARTVGEALARRLEDGRPVRARMVGQGKDEHYELYIAREWIAQEFDALWASQQRFHAEVLADAARDRLRAILLFQRKLLPVPVGKCFLEPNQPRVAAALPSAQRFRLMQELNHLRVMTLADKRERPLSFQERNDLLAQLVARPKCGFDMLRKIVFGANKEAYRFTIESERRKELKGCDTAAKLAKVNALGTRWQALSLDEQDRLVCLLLDGENDAVLADALREHYGLTDAQIDTLLGLSFEDGHMRLGRSALLRVLDALESGRDEQGLPLSYDKAVVAAGYPAHTADLENGERDALPYYGELLWRYTQDAPTAKNDAERKFGKIANPTVHIGLNQLRKLVNALIQRYGKPAQIVVELARNLKAGLEEKERIKKQQTANLERNERIRQKLQDAGVPDNRENRLRMRLFEELGQGNGLGTPCIYSGRQISLQRLFSNDVQVDHILPFSKTLDDSFANKVLAQHDANRYKGNRGPFEAFGANRDGYAWDDIRARAAVLPRNKRNRFAETAMQDWLHNETDFLARQLTDTAYLSRVARQYLTAICSKDDVYVSPGRLTAMLRAKWGLNRVLDGVMEEQGRPAVKNRDDHRHHAIDAVVIGATDRAMLQQVATLAARAREQDAERLIGDMPTPWPNFLEDVRAAVARCVVSHKPDHGPEGGLHNDTAYGIVAGPFEDGRYRVRHRVSLFDLKPGDLSNVRCDAPLQAELEPIFEQDDARAREVALTALAERYRQRKVWLEELMSVLPIRPRGEDGKTLPDSAPYKAYKGDSNYCYELFINERGRWDGELISTFRANQAAYRRFRNDPARFRRYTAGGRPLLMRLCINDYIAVGTAAERTIFRVVKMSENKITLAEHFEGGTLKQRDADKDDPFKYLTKSPGALRDLGARRIFVDLIGRVLDPGIKGD

SEQ ID NO: 383 - protein, 1059 aa, Wolinella succinogenes
MIERILGVDLGISSLGWAIVEYDKDDEAANRIIDCGVRLFTAAETPKKKESPNKARREARGIRRVLNRRRVRMNMIKKLFLRAGLIQDVDLDGEGGMFYSKANRADVWELRHDGLYRLLKGDELARVLIHIAKHRGYKFIGDDEADEESGKVKKAGVVLRQNFEAAGCRTVGEWLWRERGANGKKRNKHGDYEISIHRDLLVEEVEAIFVAQQEMRSTIATDALKAAYREIAFFVRPMQRIEKMVGHCTYFPEERRAPKSAPTAEKFIAISKFFSTVIIDNEGWEQKIIERKTLEELLDFAVSREKVEFRHLRKFLDLSDNEIFKGLHYKGKPKTAKKREATLFDPNEPTELEFDKVEAEKKAWISLRGAAKLREALGNEFYGRFVALGKHADEATKILTYYKDEGQKRRELTKLPLEAEMVERLVKIGFSDFLKLSLKAIRDILPAMESGARYDEAVLMLGVPHKEKSAILPPLNKTDIDILNPTVIRAFAQFRKVANALVRKYGAFDRVHFELAREINTKGEIEDIKESQRKNEKERKEAADWIAETSFQVPLTRKNILKKRLYIQQDGRCAYTGDVIELERLFDEGYCEIDHILPRSRSADDSFANKVLCLARANQQKTDRTPYEWFGHDAARWNAFETRTSAPSNRVRTGKGKIDRLLKKNFDENSEMAFKDRNLNDTRYMARAIKTYCEQYWVFKNSHTKAPVQVRSGKLTSVLRYQWGLESKDRESHTHHAVDAIIIAFSTQGMVQKLSEYYRFKETHREKERPKLAVPLANFRDAVEEATRIENTETVKEGVEVKRLLISRPPRARVTGQAHEQTAKPYPRIKQVKNKKKWRLAPIDEEKFESFKADRVASANQKNFYETSTIPRVDVYHKKGKFHLVPIYLHEMVLNELPNLSLGTNPEAMDENFFKFSIFKDDLISIQTQGTPKKPAKIIMGYFKNMHGANMVLSSINNSPCEGFTCTPVSMDKKHKDKCKLCPEENRIAGRCLQGFLDYWSQEGLRPPRKEFECDQGVKFALDVKKYQIDPLGYYYEVKQEKRLGTIPQMRSAKKLVKK

SEQ ID NO: 384 - protein, 1269 aa, Mycoplasma gallisepticum
MNNSIKSKPEVTIGLDLGVGSVGWAIVDNETNIIHHLGSRLFSQAKTAEDRRSFRGVRRLIRRRKYKLKRFVNLIWKYNSYFGFKNKEDILNNYQEQQKLHNTVLNLKSEALNAKIDPKALSWILHDYLKNRGHFYEDNRDFNVYPTKELAKYFDKYGYYKGIIDSKEDNDNKLEEELTKYKFSNKHWLEEVKKVLSNQTGLPEKFKEEYESLFSYVRNYSEGPGSINSVSPYGIYHLDEKEGKVVQKYNNIWDKTIGKCNIFPDEYRAPKNSPIAMIFNEINELSTIRSYSIYLTGWFINQEFKKAYLNKLLDLLIKTNGEKPIDARQFKKLREETIAESIGKETLKDVENEEKLEKEDHKWKLKGLKLNTNGKIQYNDLSSLAKFVHKLKQHLKLDFLLEDQYATLDKINFLQSLFVYLGKHLRYSNRVDSANLKEFSDSNKLFERILQKQKDGLFKLFEQTDKDDEKILAQTHSLSTKAMLLAITRMTNLDNDEDNQKNNDKGWNFEAIKNFDQKFIDITKKNNNLSLKQNKRYLDDRFINDAILSPGVKRILREATKVFNAILKQFSEEYDVTKVVIELARELSEEKELENTKNYKKLIKKNGDKISEGLKALGISEDEIKDILKSPTKSYKFLLWLQQDHIDPYSLKEIAFDDIFTKTEKFEIDHIIPYSISFDDSSSNKLLVLAESNQAKSNQTPYEFISSGNAGIKWEDYEAYCRKFKDGDSSLLDSTQRSKKFAKMMKTDTSSKYDIGFLARNLNDTRYATIVFRDALEDYANNHLVEDKPMFKVVCINGSVTSFLRKNFDDSSYAKKDRDKNIHHAVDASIISIFSNETKTLFNQLTQFADYKLFKNTDGSWKKIDPKTGVVTEVTDENWKQIRVRNQVSEIAKVIEKYIQDSNIERKARYSRKIENKTNISLFNDTVYSAKKVGYEDQIKRKNLKTLDIHESAKENKNSKVKRQFVYRKLVNVSLLNNDKLADLFAEKEDILMYRANPWVINLAEQIFNEYTENKKIKSQNVFEKYMLDLTKEFPEKFSEFLVKSMLRNKTAIIYDDKKNIVHRIKRLKMLSSELKENKLSNVIIRSKNQSGTKLSYQDTINSLALMIMRSIDPTAKKQYIRVPLNTLNLHLGDHDFDLHNMDAYLKKPKFVKYLKANEIGDEYKPWRVLTSGTLLIHKKDKKLMYISSFQNLNDVIEIKNLIETEYKENDDSDSKKKKKANRFLMTLSTILNDYILLDAKDNFDILGLSKNRIDEILNSKLGLDKIVK

SEQ ID NO: 385 - protein, 1138 aa, Acidothermus cellulolyticus
MGGSEVGTVPVTWRLGVDVGERSIGLAAVSYEEDKPKEILAAVSWIHDGGVGDERSGASRLALRGMARRARRLRRFRRARLRDLDMLLSELGWTPLPDKNVSPVDAWLARKRLAEEYVVDETERRRLLGYAVSHMARHRGWRNPWTTIKDLKNLPQPSDSWERTRESLEARYSVSLEPGTVGQWAGYLLQRAPGIRLNPTQQSAGRRAELSNATAFETRLRQEDVLWELRCIADVQGLPEDVVSNVIDAVFCQKRPSVPAERIGRDPLDPSQLRASRACLEFQEYRIVAAVANLRIRDGSGSRPLSLEERNAVIEALLAQTERSLTWSDIALEILKLPNESDLTSVPEEDGPSSLAYSQFAPFDETSARIAEFIAKNRRKIPTFAQWWQEQDRTSRSDLVAALADNSIAGEEEQELLVHLPDAELEALEGLALPSGRVAYSRLTLSGLTRVMRDDGVDVHNARKTCFGVDDNWRPPLPALHEATGHPVVDRNLAILRKFLSSATMRWGPPQSIVVELARGASESRERQAEEEAARRAHRKANDRIRAELRASGLSDPSPADLVRARLLELYDCHCMYCGAPISWENSELDHIVPRTDGGSNRHENLAITCGACNKEKGRRPFASWAETSNRVQLRDVIDRVQKLKYSGNMYWTRDEFSRYKKSVVARLKRRTSDPEVIQSIESTGYAAVALRDRLLSYGEKNGVAQVAVFRGGVTAEARRWLDISIERLFSRVAIFAQSTSTKRLDRRHHAVDAVVLTTLTPGVAKTLADARSRRVSAEFWRRPSDVNRHSTEEPQSPAYRQWKESCSGLGDLLISTAARDSIAVAAPLRLRPTGALHEETLRAFSEHTVGAAWKGAELRRIVEPEVYAAFLALTDPGGRFLKVSPSEDVLPADENRHIVLSDRVLGPRDRVKLFPDDRGSIRVRGGAAYIASFHHARVFRWGSSHSPSFALLRVSLADLAVAGLLRDGVDVFTAELPPWTPAWRYASIALVKAVESGDAKQVGWLVPGDELDFGPEGVTTAAGDLSMFLKYFPERHWVVTGFEDDKRINLKPAFLSAEQAEVLRTERSDRPDTLTEAGEILAQFFPRCWRATVAKVLCHPGLTVIRRTALGQPRWRRGHLPYSWRPWSADPWSGGTP

SEQ ID NO: 386 - protein, 1265 aa, Mycoplasma ovipneumoniae
MHNKKNITIGFDLGIASIGWAIIDSTTSKILDWGTRTFEERKTANERRAFRSTRRNIRRKAYRNQRFINLILKYKDLFELKNISDIQRANKKDTENYEKIISFFTEIYKKCAAKHSNILEVKVKALDSKIEKLDLIWILHDYLENRGFFYDLEEENVADKYEGIEHPSILLYDFFKKNGFFKSNSSIPKDLGGYSFSNLQWVNEIKKLFEVQEINPEFSEKFLNLFTSVRDYAKGPGSEHSASEYGIFQKDEKGKVFKKYDNIWDKTIGKCSFFVEENRSPVNYPSYEIFNLLNQLINLSTDLKTTNKKIWQLSSNDRNELLDELLKVKEKAKIISISLKKNEIKKIILKDFGFEKSDIDDQDTIEGRKIIKEEPTTKLEVTKHLLATIYSHSSDSNWININNILEFLPYLDAICIILDREKSRGQDEVLKKLTEKNIFEVLKIDREKQLDFVKSIFSNTKFNFKKIGNFSLKAIREFLPKMFEQNKNSEYLKWKDEEIRRKWEEQKSKLGKTDKKTKYLNPRIFQDEIISPGTKNTFEQAVLVLNQIIKKYSKENIIDAIIIESPREKNDKKTIEEIKKRNKKGKGKTLEKLFQILNLENKGYKLSDLETKPAKLLDRLRFYHQQDGIDLYTLDKINIDQLINGSQKYEIEHIIPYSMSYDNSQANKILTEKAENLKKGKLIASEYIKRNGDEFYNKYYEKAKELFINKYKKNKKLDSYVDLDEDSAKNRFRFLTLQDYDEFQVEFLARNLNDTRYSTKLFYHALVEHFENNEFFTYIDENSSKHKVKISTIKGHVTKYFRAKPVQKNNGPNENLNNNKPEKIEKNRENNEHHAVDAAIVAIIGNKNPQIANLLTLADNKTDKKFLLHDENYKENIETGELVKIPKFEVDKLAKVEDLKKIIQEKYEEAKKHTAIKFSRKTRTILNGGLSDETLYGFKYDEKEDKYFKIIKKKLVTSKNEELKKYFENPFGKKADGKSEYTVLMAQSHLSEFNKLKEIFEKYNGFSNKTGNAFVEYMNDLALKEPTLKAEIESAKSVEKLLYYNFKPSDQFTYHDNINNKSFKRFYKNIRIIEYKSIPIKFKILSKHDGGKSFKDTLFSLYSLVYKVYENGKESYKSIPVTSQMRNFGIDEFDFLDENLYNKEKLDIYKSDFAKPIPVNCKPVFVLKKGSILKKKSLDIDDFKETKETEEGNYYFISTISKRFNRDTAYGLKPLKLSVVKPVAEPSTNPIFKEYIPIHLDELGNEYPVKIKEHTDDEKLMCTIK

SEQ ID NO: 387 - DNA, 22 bp, synthetic construct
  misc_feature 1..22: note = CEP290-11 targeting domain (DNA)
  source 1..22: mol_type = other DNA
gacactgccaatagggataggt

SEQ ID NO: 388 - DNA, 22 bp, synthetic construct
  misc_feature 1..22: note = CEP290-64 targeting domain (DNA)
  source 1..22: mol_type = other DNA
gtcaaaagctaccggttacctg

SEQ ID NO: 389 - DNA, 22 bp, synthetic construct
  misc_feature 1..22: note = CEP290-323 targeting domain (DNA)
  source 1..22: mol_type = other DNA
gttctgtcctcagtaaaaggta

SEQ ID NO: 390 - DNA, 20 bp, synthetic construct
  misc_feature 1..20: note = CEP290-490 targeting domain (DNA)
  source 1..20: mol_type = other DNA
gaatagtttgttctgggtac

SEQ ID NO: 391 - DNA, 20 bp, synthetic construct
  misc_feature 1..20: note = CEP290-492 targeting domain (DNA)
  source 1..20: mol_type = other DNA
gagaaagggatgggcactta

SEQ ID NO: 392 - DNA, 20 bp, synthetic construct
  misc_feature 1..20: note = CEP290-496/-B115/-B1041/-85 targeting domain (DNA)
  source 1..20: mol_type = other DNA
gatgcagaactagtgtagac

SEQ ID NO: 393 - DNA, 20 bp, synthetic construct
  misc_feature 1..20: note = CEP290-502/-B1055 targeting domain (DNA)
  source 1..20: mol_type = other DNA
gtcacatgggagtcacaggg

SEQ ID NO: 394 - DNA, 19 bp, synthetic construct
  misc_feature 1..19: note = CEP290-504 targeting domain (DNA)
  source 1..19: mol_type = other DNA
gagtatctcctgtttggca

SEQ ID NO: 395 - RNA, 20 nt, synthetic construct
  misc_feature 1..20: note = CEP290-B4/-B1000/-54 targeting domain (RNA)
  source 1..20: mol_type = other RNA
gagatactcacaattacaac

SEQ ID NO: 396 - RNA, 20 nt, synthetic construct
  misc_feature 1..20: note = CEP290-B28 targeting domain (RNA)
  source 1..20: mol_type = other RNA
gatactcacaattacaactg

SEQ ID NO: 397 - RNA, 17 nt, synthetic construct
  misc_feature 1..17: note = CEP290-B1001 targeting domain (RNA)
  source 1..17: mol_type = other RNA
gatactcacaattacaa

SEQ ID NO: 398 - RNA, 22 nt, synthetic construct
  misc_feature 1..22: note = CEP290-12 targeting domain (RNA)
  source 1..22: mol_type = other RNA
gcacctggccccagttgtaatt

SEQ ID NO: 399 - DNA, 25 bp, synthetic construct
  misc_feature 1..25: note = PCR primer ITR-Titer-fwd
  source 1..25: mol_type = other DNA
aacatgctacgcagagagggagtgg

SEQ ID NO: 400 - DNA, 29 bp, synthetic construct
  misc_feature 1..29: note = PCR primer ITR-Titer-rev
  source 1..29: mol_type = other DNA
catgagacaaggaacccctagtgatggag

SEQ ID NO: 401 - DNA, 617 bp, synthetic construct
  misc_feature 1..617: note = CMV promoter
  source 1..617: mol_type = other DNA
cattgattattgactagttattaatagtaatcaattacggggtcattagttcatagcccatatatggagttccgcgttacataacttacggtaaatggcccgcctggctgaccgcccaacgacccccgcccattgacgtcaataatgacgtatgttcccatagtaacgccaatagggactttccattgacgtcaatgggtggactatttacggtaaactgcccacttggcagtacatcaagtgtatcatatgccaagtacgccccctattgacgtcaatgacggtaaatggcccgcctggcattatgcccagtacatgaccttatgggactttcctacttggcagtacatctacgtattagtcatcgctattaccatggtgatgcggttttggcagtacatcaatgggcgtggatagcggtttgactcacggggatttccaagtctccaccccattgacgtcaatgggagtttgttttggcaccaaaatcaacgggactttccaaaatgtcgtaacaactccgccccattgacgcaaatgggcggtaggcgtgtacggtgggaggtctatataagcagagctggtttagtgaaccgtcagatccgctagagatccgc

SEQ ID NO: 402 - DNA, 252 bp, synthetic construct
  misc_feature 1..252: note = EFS promoter
  source 1..252: mol_type = other DNA
tcgagtggctccggtgcccgtcagtgggcagagcgcacatcgcccacagtccccgagaagttggggggaggggtcggcaattgaaccggtgcctagagaaggtggcgcggggtaaactgggaaagtgatgtcgtgtactggctccgcctttttcccgagggtgggggagaaccgtatataagtgcagtagtcgccgtgaacgttctttttcgcaacgggtttgccgccagaacacaggtgtcgtgaccgcgg

SEQ ID NO: 403 - DNA, 292 bp, Homo sapiens
  source 1..292: mol_type = other DNA
gggccccagaagcctggtggttgtttgtccttctcaggggaaaagtgaggcggccccttggaggaaggggccgggcagaatgatctaatcggattccaagcagctcaggggattgtctttttctagcaccttcttgccactcctaagcgtcctccgtgaccccggctgggatttcgcctggtgctgtgtcagccccggtctcccaggggcttcccagtggtccccaggaaccctcgacagggcccggtctctctcgtccagcaagggcagggacgggccacaggccaagggc

SEQ ID NO: 404 - DNA, 113 bp, Homo sapiens
  source 1..113: mol_type = other DNA
gcctgtagccttaatctctcctagcagggggtttgggggagggaggaggagaaagaaagggccccttatggctgagacacaatgacccagccacaaggagggattaccgggcg

SEQ ID NO: 405 - DNA, 281 bp, Homo sapiens
  source 1..281: mol_type = other DNA
aggtaggaagtggcctttaactccatagaccctatttaaacagcttcggacaggtttaaacatctccttggataattcctagtatccctgttcccactcctactcagggatgatagctctaagaggtgttaggggattaggctgaaaatgtaggtcacccctcagccatctgggaactagaatgagtgagagaggagagaggggcagagacacacacattcgcatattaaggtgacgcgtgtggcctcgaacaccgagcgaccctgcagcgacccgcttaa

SEQ ID NO: 406 - DNA, 235 bp, Homo sapiens
  source 1..235: mol_type = other DNA
attttaatctcactagggttctgggagcacccccccccaccgctcccgccctccacaaagctcctgggcccctcctcccttcaaggattgcgaagagctggtcgcaaatcctcctaagccaccagcatctcggtcttcagctcacaccagccttgagcccagcctgcggccaggggaccacgcacgtcccacccacccagcgactccccagccgctgcccactcttcctcactca

SEQ ID NO: 407 - DNA, 143 bp, synthetic construct
  misc_feature 1..143: note = AAV1 left ITR sequence
  source 1..143: mol_type = other DNA
ttgcccactccctctctgcgcgctcgctcgctcggtggggcctgcggaccaaaggtccgcagacggcagagctctgctctgccggccccaccgagcgagcgagcgcgcagagagggagtgggcaactccatcactaggggtaa

SEQ ID NO: 408 - DNA, 145 bp, synthetic construct
  misc_feature 1..145: note = AAV2 left ITR sequence
  source 1..145: mol_type = other DNA
ttggccactccctctctgcgcgctcgctcgctcactgaggccgggcgaccaaaggtcgcccgacgcccgggctttgcccgggcggcctcagtgagcgagcgagcgcgcagagagggagtggccaactccatcactaggggttcct

SEQ ID NO: 409 - DNA, 142 bp, synthetic construct
  misc_feature 1..142: note = AAV3B left ITR sequence
  source 1..142: mol_type = other DNA
tggccactccctctatgcgcactcgctcgctcggtggggcctggcgaccaaaggtcgccagacggacgtgctttgcacgtccggccccaccgagcgagcgagtgcgcatagagggagtggccaactccatcactagaggtat

SEQ ID NO: 410 - DNA, 146 bp, synthetic construct
  misc_feature 1..146: note = AAV4 left ITR sequence
  source 1..146: mol_type = other DNA
ttggccactccctctatgcgcgctcgctcactcactcggccctggagaccaaaggtctccagactgccggcctctggccggcagggccgagtgagtgagcgagcgcgcatagagggagtggccaactccatcatctaggtttgccc

SEQ ID NO: 411 - DNA, 155 bp, synthetic construct
  misc_feature 1..155: note = AAV5 left ITR sequence
  source 1..155: mol_type = other DNA
ctctcccccctgtcgcgttcgctcgctcgctggctcgtttgggggggtggcagctcaaagagctgccagacgacggccctctggccgtcgcccccccaaacgagccagcgagcgagcgaacgcgacaggggggagagtgccacactctcaagcaa

SEQ ID NO: 412 - DNA, 143 bp, synthetic construct
  misc_feature 1..143: note = AAV6 left ITR sequence
  source 1..143: mol_type = other DNA
atacccctagtgatggagttgcccactccctctatgcgcgctcgctcgctcggtggggccggcagagcagagctctgccgtctgcggacctttggtccgcaggccccaccgagcgagcgagcgcgcatagagggagtgggcaa

SEQ ID NO: 413 - DNA, 145 bp, synthetic construct
  misc_feature 1..145: note = AAV7 left ITR sequence
  source 1..145: mol_type = other DNA
ttggccactccctctatgcgcgctcgctcgctcggtggggcctgcggaccaaaggtccgcagacggcagagctctgctctgccggccccaccgagcgagcgagcgcgcatagagggagtggccaactccatcactaggggtaccg

SEQ ID NO: 414 - DNA, 145 bp, synthetic construct
  misc_feature 1..145: note = AAV8 left ITR sequence
  source 1..145: mol_type = other DNA
cagagagggagtggccaactccatcactaggggtagcgcgaagcgcctcccacgctgccgcgtcagcgctgacgtaaattacgtcataggggagtggtcctgtattagctgtcacgtgagtgcttttgcggcattttgcgacacc

SEQ ID NO: 415 - DNA, 145 bp, synthetic construct
  misc_feature 1..145: note = AAV9 left ITR sequence
  source 1..145: mol_type = other DNA
cagagagggagtggccaactccatcactaggggtaatcgcgaagcgcctcccacgctgccgcgtcagcgctgacgtagattacgtcataggggagtggtcctgtattagctgtcacgtgagtgcttttgcgacattttgcgacac

SEQ ID NO: 416 - DNA, 19 bp, synthetic construct
  misc_feature 1..19: note = Spacer
  source 1..19: mol_type = other DNA
cagatctgaattcggtacc

SEQ ID NO: 417 - DNA, 264 bp, synthetic construct
  misc_feature 1..264: note = Exemplary U6 promoter
  source 1..264: mol_type = other DNA
aaggtcgggcaggaagagggcctatttcccatgattccttcatatttgcatatacgatacaaggctgttagagagataattagaattaatttgactgtaaacacaaagatattagtacaaaatacgtgacgtagaaagtaataatttcttgggtagtttgcagttttaaaattatgttttaaaatggactatcatatgcttaccgtaacttgaaagtatttcgatttcttggctttatatatcttgtggaaaggacgaaacacc

SEQ ID NO: 418 - DNA, 82 bp, synthetic construct
  misc_feature 1..82: note = Exemplary S. auerus gRNA scaffold
  source 1..82: mol_type = other DNA
gttttagtactctggaaacagaatctactaaaacaaggcaaaatgccgtgtttatctcgtcaacttgttggcgagatttttt

SEQ ID NO: 419 - DNA, 50 bp, synthetic construct
  misc_feature 1..50: note = Spacer
  source 1..50: mol_type = other DNA
ggtaccgctagcgcttaagtcgcgatgtacgggccagatatacgcgttga

SEQ ID NO: 420 - DNA, 30 bp, synthetic construct
  misc_feature 1..30: note = Exemplary N-ter NLS
  source 1..30: mol_type = other DNA
ccgaagaaaaagcgcaaggtcgaagcgtcc

SEQ ID NO: 421 - skipped

SEQ ID NO: 422 - DNA, 21 bp, synthetic construct
  misc_feature 1..21: note = Exemplary C-ter NLS
  source 1..21: mol_type = other DNA
cccaagaagaagaggaaagtc

SEQ ID NO: 423 - DNA, 66 bp, synthetic construct
  misc_feature 1..66: note = Exemplary 3x FLAG
  source 1..66: mol_type = other DNA
gactacaaagaccatgacggtgattataaagatcatgacatcgattacaaggatgacgatgacaag

SEQ ID NO: 424 - DNA, 60 bp, synthetic construct
  misc_feature 1..60: note = Mini polyA
  source 1..60: mol_type = other DNA
tagcaataaaggatcgtttattttcattggaagcgtgtgttggttttttgatcaggcgcg

SEQ ID NO: 425 - DNA, 86 bp, synthetic construct
  misc_feature 1..86: note = Spacer
  source 1..86: mol_type = other DNA
tccaagcttcgcaggaaagaacatgtgagcaaaaggccagcaaaaggcgttaactctagatttaaatgcatgctggggagagatct

SEQ ID NO: 426 - protein, 22 aa, synthetic construct
  VAR_SEQ 1..22: note = Exemplary 3x FLAG
DYKDHDGDYKDHDIDYKDDDDK

SEQ ID NO: 427 - DNA, 20 bp, synthetic construct
  misc_feature 1..20: note = Spacer
  source 1..20: mol_type = other DNA
cgacttagttcgatcgaagg

SEQ ID NO: 428 - DNA, 5217 bp, synthetic construct
  misc_feature 1..5217: note = Exemplary recombinant AAV genome containing CMV promoter (5'->3' upper strand)
  misc_feature 429..454: note = a, c, g, or t
  misc_feature 821..846: note = a, c, g, or t
  source 1..5217: mol_type = other DNA
ttggccactccctctctgcgcgctcgctcgctcactgaggccgggcgaccaaaggtcgcccgacgcccgggctttgcccgggcggcctcagtgagcgagcgagcgcgcagagagggagtggccaactccatcactaggggttcctcagatctgaattcggtaccaaggtcgggcaggaagagggcctatttcccatgattccttcatatttgcatatacgatacaaggctgttagagagataattagaattaatttgactgtaaacacaaagatattagtacaaaatacgtgacgtagaaagtaataatttcttgggtagtttgcagttttaaaattatgttttaaaatggactatcatatgcttaccgtaacttgaaagtatttcgatttcttggctttatatatcttgtggaaaggacgaaacaccnnnnnnnnnnnnnnnnnnnnnnnnnngttttagtactctggaaacagaatctactaaaacaaggcaaaatgccgtgtttatctcgtcaacttgttggcgagattttttcgacttagttcgatcgaaggaaggtcgggcaggaagagggcctatttcccatgattccttcatatttgcatatacgatacaaggctgttagagagataattagaattaatttgactgtaaacacaaagatattagtacaaaatacgtgacgtagaaagtaataatttcttgggtagtttgcagttttaaaattatgttttaaaatggactatcatatgcttaccgtaacttgaaagtatttcgatttcttggctttatatatcttgtggaaaggacgaaacaccnnnnnnnnnnnnnnnnnnnnnnnnnngttttagtactctggaaacagaatctactaaaacaaggcaaaatgccgtgtttatctcgtcaacttgttggcgagattttttggtaccgctagcgcttaagtcgcgatgtacgggccagatatacgcgttgacattgattattgactagttattaatagtaatcaattacggggtcattagttcatagcccatatatggagttccgcgttacataacttacggtaaatggcccgcctggctgaccgcccaacgacccccgcccattgacgtcaataatgacgtatgttcccatagtaacgccaatagggactttccattgacgtcaatgggtggactatttacggtaaactgcccacttggcagtacatcaagtgtatcatatgccaagtacgccccctattgacgtcaatgacggtaaatggcccgcctggcattatgcccagtacatgaccttatgggactttcctacttggcagtacatctacgtattagtcatcgctattaccatggtgatgcggttttggcagtacatcaatgggcgtggatagcggtttgactcacggggatttccaagtctccaccccattgacgtcaatgggagtttgttttggcaccaaaatcaacgggactttccaaaatgtcgtaacaactccgccccattgacgcaaatgggcggtaggcgtgtacggtgggaggtctatataagcagagctggtttagtgaaccgtcagatccgctagagatccgcgcggccgctaatacgactcactatagggagagccgccaccatgccgaagaaaaagcgcaaggtcgaagcgtccatgaaaaggaactacattctggggctggacatcgggattacaagcgtggggtatgggattattgactatgaaacaagggacgtgatcgacgcaggcgtcagactgttcaaggaggccaacgtggaaaacaatgagggacggagaagcaagaggggagccaggcgcctgaaacgacggagaaggcacagaatccagagggtgaagaaactgctgttcgattacaacctgctgaccgaccattctgagctgagtggaattaatccttatgaagccagggtgaaaggcctgagtcagaagctgtcagaggaagagttttccgcagctctgctgcacctggctaagcgccgaggagtgcataacgtcaatgaggtggaagaggacaccggcaacgagctgtctacaaaggaacagatctcacgcaatagcaaagctctggaagagaagtatgtcgcagagctgcagctggaacggctgaagaaagatggcgaggtgagagggtcaattaataggttcaagacaagcgactacgtcaaagaagccaagcagctgctgaaagtgcagaaggcttaccaccagctggatcagagcttcatcgatacttatatcgacctgctggagactcggagaacctactatgagggaccaggagaagggagccccttcggatggaaagacatcaaggaatggtacgagatgctgatgggacattgcacctattttccagaagagctgagaagcgtcaagtacgcttataacgcagatctgtacaacgccctgaatgacctgaacaacctggtcatcaccagggatgaaaacgagaaactggaatactatgagaagttccagatcatcgaaaacgtgtttaagcagaagaaaaagcctacactgaaacagattgctaaggagatcctggtcaacgaagaggacatcaagggctaccgggtgacaagcactggaaaaccagagttcaccaatctgaaagtgtatcacgatattaaggacatcacagcacggaaagaaatcattgagaacgccgaactgctggatcagattgctaagatcctgactatctaccagagctccgaggacatccaggaagagctgactaacctgaacagcgagctgacccaggaagagatcgaacagattagtaatctgaaggggtacaccggaacacacaacctgtccctgaaagctatcaatctgattctggatgagctgtggcatacaaacgacaatcagattgcaatctttaaccggctgaagctggtcccaaaaaaggtggacctgagtcagcagaaagagatcccaaccacactggtggacgatttcattctgtcacccgtggtcaagcggagcttcatccagagcatcaaagtgatcaacgccatcatcaagaagtacggcctgcccaatgatatcattatcgagctggctagggagaagaacagcaaggacgcacagaagatgatcaatgagatgcagaaacgaaaccggcagaccaatgaacgcattgaagagattatccgaactaccgggaaagagaacgcaaagtacctgattgaaaaaatcaagctgcacgatatgcaggagggaaagtgtctgtattctctggaggccatccccctggaggacctgctgaacaatccattcaactacgaggtcgatcatattatccccagaagcgtgtccttcgacaattcctttaacaacaaggtgctggtcaagcaggaagagaactctaaaaagggcaataggactcctttccagtacctgtctagttcagattccaagatctcttacgaaacctttaaaaagcacattctgaatctggccaaaggaaagggccgcatcagcaagaccaaaaaggagtacctgctggaagagcgggacatcaacagattctccgtccagaaggattttattaaccggaatctggtggacacaagatacgctactcgcggcctgatgaatctgctgcgatcctatttccgggtgaacaatctggatgtgaaagtcaagtccatcaacggcgggttcacatcttttctgaggcgcaaatggaagtttaaaaaggagcgcaacaaagggtacaagcaccatgccgaagatgctctgattatcgcaaatgccgacttcatctttaaggagtggaaaaagctggacaaagccaagaaagtgatggagaaccagatgttcgaagagaagcaggccgaatctatgcccgaaatcgagacagaacaggagtacaaggagattttcatcactcctcaccagatcaagcatatcaaggatttcaaggactacaagtactctcaccgggtggataaaaagcccaacagagagctgatcaatgacaccctgtatagtacaagaaaagacgataaggggaataccctgattgtgaacaatctgaacggactgtacgacaaagataatgacaagctgaaaaagctgatcaacaaaagtcccgagaagctgctgatgtaccaccatgatcctcagacatatcagaaactgaagctgattatggagcagtacggcgacgagaagaacccactgtataagtactatgaagagactgggaactacctgaccaagtatagcaaaaaggataatggccccgtgatcaagaagatcaagtactatgggaacaagctgaatgcccatctggacatcacagacgattaccctaacagtcgcaacaaggtggtcaagctgtcactgaagccatacagattcgatgtctatctggacaacggcgtgtataaatttgtgactgtcaagaatctggatgtcatcaaaaaggagaactactatgaagtgaatagcaagtgctacgaagaggctaaaaagctgaaaaagattagcaaccaggcagagttcatcgcctccttttacaacaacgacctgattaagatcaatggcgaactgtatagggtcatcggggtgaacaatgatctgctgaaccgcattgaagtgaatatgattgacatcacttaccgagagtatctggaaaacatgaatgataagcgcccccctcgaattatcaaaacaattgcctctaagactcagagtatcaaaaagtactcaaccgacattctgggaaacctgtatgaggtgaagagcaaaaagcaccctcagattatcaaaaagggcggatcccccaagaagaagaggaaagtctcgagcgactacaaagaccatgacggtgattataaagatcatgacatcgattacaaggatgacgatgacaagtagcaataaaggatcgtttattttcattggaagcgtgtgttggttttttgatcaggcgcgtccaagcttcgcaggaaagaacatgtgagcaaaaggccagcaaaaggcgttaactctagatttaaatgcatgctggggagagatctaggaacccctagtgatggagttggccactccctctctgcgcgctcgctcgctcactgaggccgcccgggcaaagcccgggcgtcgggcgacctttggtcgcccggcctcagtgagcgagcgagcgcgcagagagggagtggccaa

SEQ ID NO: 429 - DNA, 4870 bp, synthetic construct
  misc_feature 1..4870: note = Exemplary recombinant AAV genome containing EFS promoter (5'->3' upper strand)
  misc_difference 429..454: note = a, c, g, or t
  misc_difference 821..846: note = a, c, g, or t
  source 1..4870: mol_type = other DNA
ttggccactccctctctgcgcgctcgctcgctcactgaggccgggcgaccaaaggtcgcccgacgcccgggctttgcccgggcggcctcagtgagcgagcgagcgcgcagagagggagtggccaactccatcactaggggttcctcagatctgaattcggtaccaaggtcgggcaggaagagggcctatttcccatgattccttcatatttgcatatacgatacaaggctgttagagagataattagaattaatttgactgtaaacacaaagatattagtacaaaatacgtgacgtagaaagtaataatttcttgggtagtttgcagttttaaaattatgttttaaaatggactatcatatgcttaccgtaacttgaaagtatttcgatttcttggctttatatatcttgtggaaaggacgaaacaccnnnnnnnnnnnnnnnnnnnnnnnnnngttttagtactctggaaacagaatctactaaaacaaggcaaaatgccgtgtttatctcgtcaacttgttggcgagattttttcgacttagttcgatcgaaggaaggtcgggcaggaagagggcctatttcccatgattccttcatatttgcatatacgatacaaggctgttagagagataattagaattaatttgactgtaaacacaaagatattagtacaaaatacgtgacgtagaaagtaataatttcttgggtagtttgcagttttaaaattatgttttaaaatggactatcatatgcttaccgtaacttgaaagtatttcgatttcttggctttatatatcttgtggaaaggacgaaacaccnnnnnnnnnnnnnnnnnnnnnnnnnngttttagtactctggaaacagaatctactaaaacaaggcaaaatgccgtgtttatctcgtcaacttgttggcgagattttttggtaccgctagcgcttaagtcgcgatgtacgggccagatatacgcgttgacattgattattgactagttcgagtggctccggtgcccgtcagtgggcagagcgcacatcgcccacagtccccgagaagttggggggaggggtcggcaattgaaccggtgcctagagaaggtggcgcggggtaaactgggaaagtgatgtcgtgtactggctccgcctttttcccgagggtgggggagaaccgtatataagtgcagtagtcgccgtgaacgttctttttcgcaacgggtttgccgccagaacacaggtgtcgtgaccgcgggcggccgctaatacgactcactatagggagagccgccaccatgccgaagaaaaagcgcaaggtcgaagcgtccatgaaaaggaactacattctggggctggacatcgggattacaagcgtggggtatgggattattgactatgaaacaagggacgtgatcgacgcaggcgtcagactgttcaaggaggccaacgtggaaaacaatgagggacggagaagcaagaggggagccaggcgcctgaaacgacggagaaggcacagaatccagagggtgaagaaactgctgttcgattacaacctgctgaccgaccattctgagctgagtggaattaatccttatgaagccagggtgaaaggcctgagtcagaagctgtcagaggaagagttttccgcagctctgctgcacctggctaagcgccgaggagtgcataacgtcaatgaggtggaagaggacaccggcaacgagctgtctacaaaggaacagatctcacgcaatagcaaagctctggaagagaagtatgtcgcagagctgcagctggaacggctgaagaaagatggcgaggtgagagggtcaattaataggttcaagacaagcgactacgtcaaagaagccaagcagctgctgaaagtgcagaaggcttaccaccagctggatcagagcttcatcgatacttatatcgacctgctggagactcggagaacctactatgagggaccaggagaagggagccccttcggatggaaagacatcaaggaatggtacgagatgctgatgggacattgcacctattttccagaagagctgagaagcgtcaagtacgcttataacgcagatctgtacaacgccctgaatgacctgaacaacctggtcatcaccagggatgaaaacgagaaactggaatactatgagaagttccagatcatcgaaaacgtgtttaagcagaagaaaaagcctacactgaaacagattgctaaggagatcctggtcaacgaagaggacatcaagggctaccgggtgacaagcactggaaaaccagagttcaccaatctgaaagtgtatcacgatattaaggacatcacagcacggaaagaaatcattgagaacgccgaactgctggatcagattgctaagatcctgactatctaccagagctccgaggacatccaggaagagctgactaacctgaacagcgagctgacccaggaagagatcgaacagattagtaatctgaaggggtacaccggaacacacaacctgtccctgaaagctatcaatctgattctggatgagctgtggcatacaaacgacaatcagattgcaatctttaaccggctgaagctggtcccaaaaaaggtggacctgagtcagcagaaagagatcccaaccacactggtggacgatttcattctgtcacccgtggtcaagcggagcttcatccagagcatcaaagtgatcaacgccatcatcaagaagtacggcctgcccaatgatatcattatcgagctggctagggagaagaacagcaaggacgcacagaagatgatcaatgagatgcagaaacgaaaccggcagaccaatgaacgcattgaagagattatccgaactaccgggaaagagaacgcaaagtacctgattgaaaaaatcaagctgcacgatatgcaggagggaaagtgtctgtattctctggaggccatccccctggaggacctgctgaacaatccattcaactacgaggtcgatcatattatccccagaagcgtgtccttcgacaattcctttaacaacaaggtgctggtcaagcaggaagagaactctaaaaagggcaataggactcctttccagtacctgtctagttcagattccaagatctcttacgaaacctttaaaaagcacattctgaatctggccaaaggaaagggccgcatcagcaagaccaaaaaggagtacctgctggaagagcgggacatcaacagattctccgtccagaaggattttattaaccggaatctggtggacacaagatacgctactcgcggcctgatgaatctgctgcgatcctatttccgggtgaacaatctggatgtgaaagtcaagtccatcaacggcgggttcacatcttttctgaggcgcaaatggaagtttaaaaaggagcgcaacaaagggtacaagcaccatgccgaagatgctctgattatcgcaaatgccgacttcatctttaaggagtggaaaaagctggacaaagccaagaaagtgatggagaaccagatgttcgaagagaagcaggccgaatctatgcccgaaatcgagacagaacaggagtacaaggagattttcatcactcctcaccagatcaagcatatcaaggatttcaaggactacaagtactctcaccgggtggataaaaagcccaacagagagctgatcaatgacaccctgtatagtacaagaaaagacgataaggggaataccctgattgtgaacaatctgaacggactgtacgacaaagataatgacaagctgaaaaagctgatcaacaaaagtcccgagaagctgctgatgtaccaccatgatcctcagacatatcagaaactgaagctgattatggagcagtacggcgacgagaagaacccactgtataagtactatgaagagactgggaactacctgaccaagtatagcaaaaaggataatggccccgtgatcaagaagatcaagtactatgggaacaagctgaatgcccatctggacatcacagacgattaccctaacagtcgcaacaaggtggtcaagctgtcactgaagccatacagattcgatgtctatctggacaacggcgtgtataaatttgtgactgtcaagaatctggatgtcatcaaaaaggagaactactatgaagtgaatagcaagtgctacgaagaggctaaaaagctgaaaaagattagcaaccaggcagagttcatcgcctccttttacaacaacgacctgattaagatcaatggcgaactgtatagggtcatcggggtgaacaatgatctgctgaaccgcattgaagtgaatatgattgacatcacttaccgagagtatctggaaaacatgaatgataagcgcccccctcgaattatcaaaacaattgcctctaagactcagagtatcaaaaagtactcaaccgacattctgggaaacctgtatgaggtgaagagcaaaaagcaccctcagattatcaaaaagggcggatcccccaagaagaagaggaaagtctcgagcgactacaaagaccatgacggtgattataaagatcatgacatcgattacaaggatgacgatgacaagtagcaataaaggatcgtttattttcattggaagcgtgtgttggttttttgatcaggcgcgtccaagcttcgcaggaaagaacatgtgagcaaaaggccagcaaaaggcgttaactctagatttaaatgcatgctggggagagatctaggaacccctagtgatggagttggccactccctctctgcgcgctcgctcgctcactgaggccgcccgggcaaagcccgggcgtcgggcgacctttggtcgcccggcctcagtgagcgagcgagcgcgcagagagggagtggccaa

SEQ ID NO: 430 - DNA, 4910 bp, synthetic construct
  misc_feature 1..4910: note = Exemplary recombinant AAV genome containing CRK1 promoter (5'->3' upper strand)
  misc_difference 429..454: note = a, c, g, or t
  misc_difference 821..846: note = a, c, g, or t
  source 1..4910: mol_type = other DNA
ttggccactccctctctgcgcgctcgctcgctcactgaggccgggcgaccaaaggtcgcccgacgcccgggctttgcccgggcggcctcagtgagcgagcgagcgcgcagagagggagtggccaactccatcactaggggttcctcagatctgaattcggtaccaaggtcgggcaggaagagggcctatttcccatgattccttcatatttgcatatacgatacaaggctgttagagagataattagaattaatttgactgtaaacacaaagatattagtacaaaatacgtgacgtagaaagtaataatttcttgggtagtttgcagttttaaaattatgttttaaaatggactatcatatgcttaccgtaacttgaaagtatttcgatttcttggctttatatatcttgtggaaaggacgaaacaccnnnnnnnnnnnnnnnnnnnnnnnnnngttttagtactctggaaacagaatctactaaaacaaggcaaaatgccgtgtttatctcgtcaacttgttggcgagattttttcgacttagttcgatcgaaggaaggtcgggcaggaagagggcctatttcccatgattccttcatatttgcatatacgatacaaggctgttagagagataattagaattaatttgactgtaaacacaaagatattagtacaaaatacgtgacgtagaaagtaataatttcttgggtagtttgcagttttaaaattatgttttaaaatggactatcatatgcttaccgtaacttgaaagtatttcgatttcttggctttatatatcttgtggaaaggacgaaacaccnnnnnnnnnnnnnnnnnnnnnnnnnngttttagtactctggaaacagaatctactaaaacaaggcaaaatgccgtgtttatctcgtcaacttgttggcgagattttttggtaccgctagcgcttaagtcgcgatgtacgggccagatatacgcgttgacattgattattgactagtgggccccagaagcctggtggttgtttgtccttctcaggggaaaagtgaggcggccccttggaggaaggggccgggcagaatgatctaatcggattccaagcagctcaggggattgtctttttctagcaccttcttgccactcctaagcgtcctccgtgaccccggctgggatttcgcctggtgctgtgtcagccccggtctcccaggggcttcccagtggtccccaggaaccctcgacagggcccggtctctctcgtccagcaagggcagggacgggccacaggccaagggcgcggccgctaatacgactcactatagggagagccgccaccatgccgaagaaaaagcgcaaggtcgaagcgtccatgaaaaggaactacattctggggctggacatcgggattacaagcgtggggtatgggattattgactatgaaacaagggacgtgatcgacgcaggcgtcagactgttcaaggaggccaacgtggaaaacaatgagggacggagaagcaagaggggagccaggcgcctgaaacgacggagaaggcacagaatccagagggtgaagaaactgctgttcgattacaacctgctgaccgaccattctgagctgagtggaattaatccttatgaagccagggtgaaaggcctgagtcagaagctgtcagaggaagagttttccgcagctctgctgcacctggctaagcgccgaggagtgcataacgtcaatgaggtggaagaggacaccggcaacgagctgtctacaaaggaacagatctcacgcaatagcaaagctctggaagagaagtatgtcgcagagctgcagctggaacggctgaagaaagatggcgaggtgagagggtcaattaataggttcaagacaagcgactacgtcaaagaagccaagcagctgctgaaagtgcagaaggcttaccaccagctggatcagagcttcatcgatacttatatcgacctgctggagactcggagaacctactatgagggaccaggagaagggagccccttcggatggaaagacatcaaggaatggtacgagatgctgatgggacattgcacctattttccagaagagctgagaagcgtcaagtacgcttataacgcagatctgtacaacgccctgaatgacctgaacaacctggtcatcaccagggatgaaaacgagaaactggaatactatgagaagttccagatcatcgaaaacgtgtttaagcagaagaaaaagcctacactgaaacagattgctaaggagatcctggtcaacgaagaggacatcaagggctaccgggtgacaagcactggaaaaccagagttcaccaatctgaaagtgtatcacgatattaaggacatcacagcacggaaagaaatcattgagaacgccgaactgctggatcagattgctaagatcctgactatctaccagagctccgaggacatccaggaagagctgactaacctgaacagcgagctgacccaggaagagatcgaacagattagtaatctgaaggggtacaccggaacacacaacctgtccctgaaagctatcaatctgattctggatgagctgtggcatacaaacgacaatcagattgcaatctttaaccggctgaagctggtcccaaaaaaggtggacctgagtcagcagaaagagatcccaaccacactggtggacgatttcattctgtcacccgtggtcaagcggagcttcatccagagcatcaaagtgatcaacgccatcatcaagaagtacggcctgcccaatgatatcattatcgagctggctagggagaagaacagcaaggacgcacagaagatgatcaatgagatgcagaaacgaaaccggcagaccaatgaacgcattgaagagattatccgaactaccgggaaagagaacgcaaagtacctgattgaaaaaatcaagctgcacgatatgcaggagggaaagtgtctgtattctctggaggccatccccctggaggacctgctgaacaatccattcaactacgaggtcgatcatattatccccagaagcgtgtccttcgacaattcctttaacaacaaggtgctggtcaagcaggaagagaactctaaaaagggcaataggactcctttccagtacctgtctagttcagattccaagatctcttacgaaacctttaaaaagcacattctgaatctggccaaaggaaagggccgcatcagcaagaccaaaaaggagtacctgctggaagagcgggacatcaacagattctccgtccagaaggattttattaaccggaatctggtggacacaagatacgctactcgcggcctgatgaatctgctgcgatcctatttccgggtgaacaatctggatgtgaaagtcaagtccatcaacggcgggttcacatcttttctgaggcgcaaatggaagtttaaaaaggagcgcaacaaagggtacaagcaccatgccgaagatgctctgattatcgcaaatgccgacttcatctttaaggagtggaaaaagctggacaaagccaagaaagtgatggagaaccagatgttcgaagagaagcaggccgaatctatgcccgaaatcgagacagaacaggagtacaaggagattttcatcactcctcaccagatcaagcatatcaaggatttcaaggactacaagtactctcaccgggtggataaaaagcccaacagagagctgatcaatgacaccctgtatagtacaagaaaagacgataaggggaataccctgattgtgaacaatctgaacggactgtacgacaaagataatgacaagctgaaaaagctgatcaacaaaagtcccgagaagctgctgatgtaccaccatgatcctcagacatatcagaaactgaagctgattatggagcagtacggcgacgagaagaacccactgtataagtactatgaagagactgggaactacctgaccaagtatagcaaaaaggataatggccccgtgatcaagaagatcaagtactatgggaacaagctgaatgcccatctggacatcacagacgattaccctaacagtcgcaacaaggtggtcaagctgtcactgaagccatacagattcgatgtctatctggacaacggcgtgtataaatttgtgactgtcaagaatctggatgtcatcaaaaaggagaactactatgaagtgaatagcaagtgctacgaagaggctaaaaagctgaaaaagattagcaaccaggcagagttcatcgcctccttttacaacaacgacctgattaagatcaatggcgaactgtatagggtcatcggggtgaacaatgatctgctgaaccgcattgaagtgaatatgattgacatcacttaccgagagtatctggaaaacatgaatgataagcgcccccctcgaattatcaaaacaattgcctctaagactcagagtatcaaaaagtactcaaccgacattctgggaaacctgtatgaggtgaagagcaaaaagcaccctcagattatcaaaaagggcggatcccccaagaagaagaggaaagtctcgagcgactacaaagaccatgacggtgattataaagatcatgacatcgattacaaggatgacgatgacaagtagcaataaaggatcgtttattttcattggaagcgtgtgttggttttttgatcaggcgcgtccaagcttcgcaggaaagaacatgtgagcaaaaggccagcaaaaggcgttaactctagatttaaatgcatgctggggagagatctaggaacccctagtgatggagttggccactccctctctgcgcgctcgctcgctcactgaggccgcccgggcaaagcccgggcgtcgggcgacctttggtcgcccggcctcagtgagcgagcgagcgcgcagagagggagtggccaa

SEQ ID NO: 431 - DNA, 4731 bp, synthetic construct
  misc_feature 1..4731: note = Exemplary recombinant AAV genome containing CRX promoter (5'->3' upper strand)
  misc_difference 429..454: note = a, c, g, or t
  misc_difference 821..846: note = a, c, g, or t
  source 1..4731: mol_type = other DNA
ttggccactccctctctgcgcgctcgctcgctcactgaggccgggcgaccaaaggtcgcccgacgcccgggctttgcccgggcggcctcagtgagcgagcgagcgcgcagagagggagtggccaactccatcactaggggttcctcagatctgaattcggtaccaaggtcgggcaggaagagggcctatttcccatgattccttcatatttgcatatacgatacaaggctgttagagagataattagaattaatttgactgtaaacacaaagatattagtacaaaatacgtgacgtagaaagtaataatttcttgggtagtttgcagttttaaaattatgttttaaaatggactatcatatgcttaccgtaacttgaaagtatttcgatttcttggctttatatatcttgtggaaaggacgaaacaccnnnnnnnnnnnnnnnnnnnnnnnnnngttttagtactctggaaacagaatctactaaaacaaggcaaaatgccgtgtttatctcgtcaacttgttggcgagattttttcgacttagttcgatcgaaggaaggtcgggcaggaagagggcctatttcccatgattccttcatatttgcatatacgatacaaggctgttagagagataattagaattaatttgactgtaaacacaaagatattagtacaaaatacgtgacgtagaaagtaataatttcttgggtagtttgcagttttaaaattatgttttaaaatggactatcatatgcttaccgtaacttgaaagtatttcgatttcttggctttatatatcttgtggaaaggacgaaacaccnnnnnnnnnnnnnnnnnnnnnnnnnngttttagtactctggaaacagaatctactaaaacaaggcaaaatgccgtgtttatctcgtcaacttgttggcgagattttttggtaccgctagcgcttaagtcgcgatgtacgggccagatatacgcgttgacattgattattgactagtgcctgtagccttaatctctcctagcagggggtttgggggagggaggaggagaaagaaagggccccttatggctgagacacaatgacccagccacaaggagggattaccgggcggcggccgctaatacgactcactatagggagagccgccaccatgccgaagaaaaagcgcaaggtcgaagcgtccatgaaaaggaactacattctggggctggacatcgggattacaagcgtggggtatgggattattgactatgaaacaagggacgtgatcgacgcaggcgtcagactgttcaaggaggccaacgtggaaaacaatgagggacggagaagcaagaggggagccaggcgcctgaaacgacggagaaggcacagaatccagagggtgaagaaactgctgttcgattacaacctgctgaccgaccattctgagctgagtggaattaatccttatgaagccagggtgaaaggcctgagtcagaagctgtcagaggaagagttttccgcagctctgctgcacctggctaagcgccgaggagtgcataacgtcaatgaggtggaagaggacaccggcaacgagctgtctacaaaggaacagatctcacgcaatagcaaagctctggaagagaagtatgtcgcagagctgcagctggaacggctgaagaaagatggcgaggtgagagggtcaattaataggttcaagacaagcgactacgtcaaagaagccaagcagctgctgaaagtgcagaaggcttaccaccagctggatcagagcttcatcgatacttatatcgacctgctggagactcggagaacctactatgagggaccaggagaagggagccccttcggatggaaagacatcaaggaatggtacgagatgctgatgggacattgcacctattttccagaagagctgagaagcgtcaagtacgcttataacgcagatctgtacaacgccctgaatgacctgaacaacctggtcatcaccagggatgaaaacgagaaactggaatactatgagaagttccagatcatcgaaaacgtgtttaagcagaagaaaaagcctacactgaaacagattgctaaggagatcctggtcaacgaagaggacatcaagggctaccgggtgacaagcactggaaaaccagagttcaccaatctgaaagtgtatcacgatattaaggacatcacagcacggaaagaaatcattgagaacgccgaactgctggatcagattgctaagatcctgactatctaccagagctccgaggacatccaggaagagctgactaacctgaacagcgagctgacccaggaagagatcgaacagattagtaatctgaaggggtacaccggaacacacaacctgtccctgaaagctatcaatctgattctggatgagctgtggcatacaaacgacaatcagattgcaatctttaaccggctgaagctggtcccaaaaaaggtggacctgagtcagcagaaagagatcccaaccacactggtggacgatttcattctgtcacccgtggtcaagcggagcttcatccagagcatcaaagtgatcaacgccatcatcaagaagtacggcctgcccaatgatatcattatcgagctggctagggagaagaacagcaaggacgcacagaagatgatcaatgagatgcagaaacgaaaccggcagaccaatgaacgcattgaagagattatccgaactaccgggaaagagaacgcaaagtacctgattgaaaaaatcaagctgcacgatatgcaggagggaaagtgtctgtattctctggaggccatccccctggaggacctgctgaacaatccattcaactacgaggtcgatcatattatccccagaagcgtgtccttcgacaattcctttaacaacaaggtgctggtcaagcaggaagagaactctaaaaagggcaataggactcctttccagtacctgtctagttcagattccaagatctcttacgaaacctttaaaaagcacattctgaatctggccaaaggaaagggccgcatcagcaagaccaaaaaggagtacctgctggaagagcgggacatcaacagattctccgtccagaaggattttattaaccggaatctggtggacacaagatacgctactcgcggcctgatgaatctgctgcgatcctatttccgggtgaacaatctggatgtgaaagtcaagtccatcaacggcgggttcacatcttttctgaggcgcaaatggaagtttaaaaaggagcgcaacaaagggtacaagcaccatgccgaagatgctctgattatcgcaaatgccgacttcatctttaaggagtggaaaaagctggacaaagccaagaaagtgatggagaaccagatgttcgaagagaagcaggccgaatctatgcccgaaatcgagacagaacaggagtacaaggagattttcatcactcctcaccagatcaagcatatcaaggatttcaaggactacaagtactctcaccgggtggataaaaagcccaacagagagctgatcaatgacaccctgtatagtacaagaaaagacgataaggggaataccctgattgtgaacaatctgaacggactgtacgacaaagataatgacaagctgaaaaagctgatcaacaaaagtcccgagaagctgctgatgtaccaccatgatcctcagacatatcagaaactgaagctgattatggagcagtacggcgacgagaagaacccactgtataagtactatgaagagactgggaactacctgaccaagtatagcaaaaaggataatggccccgtgatcaagaagatcaagtactatgggaacaagctgaatgcccatctggacatcacagacgattaccctaacagtcgcaacaaggtggtcaagctgtcactgaagccatacagattcgatgtctatctggacaacggcgtgtataaatttgtgactgtcaagaatctggatgtcatcaaaaaggagaactactatgaagtgaatagcaagtgctacgaagaggctaaaaagctgaaaaagattagcaaccaggcagagttcatcgcctccttttacaacaacgacctgattaagatcaatggcgaactgtatagggtcatcggggtgaacaatgatctgctgaaccgcattgaagtgaatatgattgacatcacttaccgagagtatctggaaaacatgaatgataagcgcccccctcgaattatcaaaacaattgcctctaagactcagagtatcaaaaagtactcaaccgacattctgggaaacctgtatgaggtgaagagcaaaaagcaccctcagattatcaaaaagggcggatcccccaagaagaagaggaaagtctcgagcgactacaaagaccatgacggtgattataaagatcatgacatcgattacaaggatgacgatgacaagtagcaataaaggatcgtttattttcattggaagcgtgtgttggttttttgatcaggcgcgtccaagcttcgcaggaaagaacatgtgagcaaaaggccagcaaaaggcgttaactctagatttaaatgcatgctggggagagatctaggaacccctagtgatggagttggccactccctctctgcgcgctcgctcgctcactgaggccgcccgggcaaagcccgggcgtcgggcgacctttggtcgcccggcctcagtgagcgagcgagcgcgcagagagggagtggccaa

SEQ ID NO: 432 - DNA, 4899 bp, synthetic construct
  misc_feature 1..4899: note = Exemplary recombinant AAV genome containing NRL promoter (5'->3' upper strand)
  misc_difference 429..454: note = a, c, g, or t
  misc_difference 821..846: note = a, c, g, or t
  source 1..4899: mol_type = other DNA
ttggccactccctctctgcgcgctcgctcgctcactgaggccgggcgaccaaaggtcgcccgacgcccgggctttgcccgggcggcctcagtgagcgagcgagcgcgcagagagggagtggccaactccatcactaggggttcctcagatctgaattcggtaccaaggtcgggcaggaagagggcctatttcccatgattccttcatatttgcatatacgatacaaggctgttagagagataattagaattaatttgactgtaaacacaaagatattagtacaaaatacgtgacgtagaaagtaataatttcttgggtagtttgcagttttaaaattatgttttaaaatggactatcatatgcttaccgtaacttgaaagtatttcgatttcttggctttatatatcttgtggaaaggacgaaacaccnnnnnnnnnnnnnnnnnnnnnnnnnngttttagtactctggaaacagaatctactaaaacaaggcaaaatgccgtgtttatctcgtcaacttgttggcgagattttttcgacttagttcgatcgaaggaaggtcgggcaggaagagggcctatttcccatgattccttcatatttgcatatacgatacaaggctgttagagagataattagaattaatttgactgtaaacacaaagatattagtacaaaatacgtgacgtagaaagtaataatttcttgggtagtttgcagttttaaaattatgttttaaaatggactatcatatgcttaccgtaacttgaaagtatttcgatttcttggctttatatatcttgtggaaaggacgaaacaccnnnnnnnnnnnnnnnnnnnnnnnnnngttttagtactctggaaacagaatctactaaaacaaggcaaaatgccgtgtttatctcgtcaacttgttggcgagattttttggtaccgctagcgcttaagtcgcgatgtacgggccagatatacgcgttgacattgattattgactagtaggtaggaagtggcctttaactccatagaccctatttaaacagcttcggacaggtttaaacatctccttggataattcctagtatccctgttcccactcctactcagggatgatagctctaagaggtgttaggggattaggctgaaaatgtaggtcacccctcagccatctgggaactagaatgagtgagagaggagagaggggcagagacacacacattcgcatattaaggtgacgcgtgtggcctcgaacaccgagcgaccctgcagcgacccgcttaagcggccgctaatacgactcactatagggagagccgccaccatgccgaagaaaaagcgcaaggtcgaagcgtccatgaaaaggaactacattctggggctggacatcgggattacaagcgtggggtatgggattattgactatgaaacaagggacgtgatcgacgcaggcgtcagactgttcaaggaggccaacgtggaaaacaatgagggacggagaagcaagaggggagccaggcgcctgaaacgacggagaaggcacagaatccagagggtgaagaaactgctgttcgattacaacctgctgaccgaccattctgagctgagtggaattaatccttatgaagccagggtgaaaggcctgagtcagaagctgtcagaggaagagttttccgcagctctgctgcacctggctaagcgccgaggagtgcataacgtcaatgaggtggaagaggacaccggcaacgagctgtctacaaaggaacagatctcacgcaatagcaaagctctggaagagaagtatgtcgcagagctgcagctggaacggctgaagaaagatggcgaggtgagagggtcaattaataggttcaagacaagcgactacgtcaaagaagccaagcagctgctgaaagtgcagaaggcttaccaccagctggatcagagcttcatcgatacttatatcgacctgctggagactcggagaacctactatgagggaccaggagaagggagccccttcggatggaaagacatcaaggaatggtacgagatgctgatgggacattgcacctattttccagaagagctgagaagcgtcaagtacgcttataacgcagatctgtacaacgccctgaatgacctgaacaacctggtcatcaccagggatgaaaacgagaaactggaatactatgagaagttccagatcatcgaaaacgtgtttaagcagaagaaaaagcctacactgaaacagattgctaaggagatcctggtcaacgaagaggacatcaagggctaccgggtgacaagcactggaaaaccagagttcaccaatctgaaagtgtatcacgatattaaggacatcacagcacggaaagaaatcattgagaacgccgaactgctggatcagattgctaagatcctgactatctaccagagctccgaggacatccaggaagagctgactaacctgaacagcgagctgacccaggaagagatcgaacagattagtaatctgaaggggtacaccggaacacacaacctgtccctgaaagctatcaatctgattctggatgagctgtggcatacaaacgacaatcagattgcaatctttaaccggctgaagctggtcccaaaaaaggtggacctgagtcagcagaaagagatcccaaccacactggtggacgatttcattctgtcacccgtggtcaagcggagcttcatccagagcatcaaagtgatcaacgccatcatcaagaagtacggcctgcccaatgatatcattatcgagctggctagggagaagaacagcaaggacgcacagaagatgatcaatgagatgcagaaacgaaaccggcagaccaatgaacgcattgaagagattatccgaactaccgggaaagagaacgcaaagtacctgattgaaaaaatcaagctgcacgatatgcaggagggaaagtgtctgtattctctggaggccatccccctggaggacctgctgaacaatccattcaactacgaggtcgatcatattatccccagaagcgtgtccttcgacaattcctttaacaacaaggtgctggtcaagcaggaagagaactctaaaaagggcaataggactcctttccagtacctgtctagttcagattccaagatctcttacgaaacctttaaaaagcacattctgaatctggccaaaggaaagggccgcatcagcaagaccaaaaaggagtacctgctggaagagcgggacatcaacagattctccgtccagaaggattttattaaccggaatctggtggacacaagatacgctactcgcggcctgatgaatctgctgcgatcctatttccgggtgaacaatctggatgtgaaagtcaagtccatcaacggcgggttcacatcttttctgaggcgcaaatggaagtttaaaaaggagcgcaacaaagggtacaagcaccatgccgaagatgctctgattatcgcaaatgccgacttcatctttaaggagtggaaaaagctggacaaagccaagaaagtgatggagaaccagatgttcgaagagaagcaggccgaatctatgcccgaaatcgagacagaacaggagtacaaggagattttcatcactcctcaccagatcaagcatatcaaggatttcaaggactacaagtactctcaccgggtggataaaaagcccaacagagagctgatcaatgacaccctgtatagtacaagaaaagacgataaggggaataccctgattgtgaacaatctgaacggactgtacgacaaagataatgacaagctgaaaaagctgatcaacaaaagtcccgagaagctgctgatgtaccaccatgatcctcagacatatcagaaactgaagctgattatggagcagtacggcgacgagaagaacccactgtataagtactatgaagagactgggaactacctgaccaagtatagcaaaaaggataatggccccgtgatcaagaagatcaagtactatgggaacaagctgaatgcccatctggacatcacagacgattaccctaacagtcgcaacaaggtggtcaagctgtcactgaagccatacagattcgatgtctatctggacaacggcgtgtataaatttgtgactgtcaagaatctggatgtcatcaaaaaggagaactactatgaagtgaatagcaagtgctacgaagaggctaaaaagctgaaaaagattagcaaccaggcagagttcatcgcctccttttacaacaacgacctgattaagatcaatggcgaactgtatagggtcatcggggtgaacaatgatctgctgaaccgcattgaagtgaatatgattgacatcacttaccgagagtatctggaaaacatgaatgataagcgcccccctcgaattatcaaaacaattgcctctaagactcagagtatcaaaaagtactcaaccgacattctgggaaacctgtatgaggtgaagagcaaaaagcaccctcagattatcaaaaagggcggatcccccaagaagaagaggaaagtctcgagcgactacaaagaccatgacggtgattataaagatcatgacatcgattacaaggatgacgatgacaagtagcaataaaggatcgtttattttcattggaagcgtgtgttggttttttgatcaggcgcgtccaagcttcgcaggaaagaacatgtgagcaaaaggccagcaaaaggcgttaactctagatttaaatgcatgctggggagagatctaggaacccctagtgatggagttggccactccctctctgcgcgctcgctcgctcactgaggccgcccgggcaaagcccgggcgtcgggcgacctttggtcgcccggcctcagtgagcgagcgagcgcgcagagagggagtggccaa

SEQ ID NO: 433 - DNA, 4853 bp, synthetic construct
  misc_feature 1..4853: note = Exemplary recombinant AAV genome containing NRL promoter (5'->3' upper strand)
  misc_difference 429..454: note = a, c, g, or t
  misc_difference 821..846: note = a, c, g, or t
  source 1..4853: mol_type = other DNA
ttggccactccctctctgcgcgctcgctcgctcactgaggccgggcgaccaaaggtcgcccgacgcccgggctttgcccgggcggcctcagtgagcgagcgagcgcgcagagagggagtggccaactccatcactaggggttcctcagatctgaattcggtaccaaggtcgggcaggaagagggcctatttcccatgattccttcatatttgcatatacgatacaaggctgttagagagataattagaattaatttgactgtaaacacaaagatattagtacaaaatacgtgacgtagaaagtaataatttcttgggtagtttgcagttttaaaattatgttttaaaatggactatcatatgcttaccgtaacttgaaagtatttcgatttcttggctttatatatcttgtggaaaggacgaaacaccnnnnnnnnnnnnnnnnnnnnnnnnnngttttagtactctggaaacagaatctactaaaacaaggcaaaatgccgtgtttatctcgtcaacttgttggcgagattttttcgacttagttcgatcgaaggaaggtcgggcaggaagagggcctatttcccatgattccttcatatttgcatatacgatacaaggctgttagagagataattagaattaatttgactgtaaacacaaagatattagtacaaaatacgtgacgtagaaagtaataatttcttgggtagtttgcagttttaaaattatgttttaaaatggactatcatatgcttaccgtaacttgaaagtatttcgatttcttggctttatatatcttgtggaaaggacgaaacaccnnnnnnnnnnnnnnnnnnnnnnnnnngttttagtactctggaaacagaatctactaaaacaaggcaaaatgccgtgtttatctcgtcaacttgttggcgagattttttggtaccgctagcgcttaagtcgcgatgtacgggccagatatacgcgttgacattgattattgactagtattttaatctcactagggttctgggagcacccccccccaccgctcccgccctccacaaagctcctgggcccctcctcccttcaaggattgcgaagaactggtcgcaaatcctcctaagccaccagcatctcggtcttcagctcacaccagccttgagcccagcctgcggccaggggaccacgcacgtcccacccacccagcgactccccagccgctgcccactcttcctcactcagcggccgctaatacgactcactatagggagagccgccaccatgccgaagaaaaagcgcaaggtcgaagcgtccatgaaaaggaactacattctggggctggacatcgggattacaagcgtggggtatgggattattgactatgaaacaagggacgtgatcgacgcaggcgtcagactgttcaaggaggccaacgtggaaaacaatgagggacggagaagcaagaggggagccaggcgcctgaaacgacggagaaggcacagaatccagagggtgaagaaactgctgttcgattacaacctgctgaccgaccattctgagctgagtggaattaatccttatgaagccagggtgaaaggcctgagtcagaagctgtcagaggaagagttttccgcagctctgctgcacctggctaagcgccgaggagtgcataacgtcaatgaggtggaagaggacaccggcaacgagctgtctacaaaggaacagatctcacgcaatagcaaagctctggaagagaagtatgtcgcagagctgcagctggaacggctgaagaaagatggcgaggtgagagggtcaattaataggttcaagacaagcgactacgtcaaagaagccaagcagctgctgaaagtgcagaaggcttaccaccagctggatcagagcttcatcgatacttatatcgacctgctggagactcggagaacctactatgagggaccaggagaagggagccccttcggatggaaagacatcaaggaatggtacgagatgctgatgggacattgcacctattttccagaagagctgagaagcgtcaagtacgcttataacgcagatctgtacaacgccctgaatgacctgaacaacctggtcatcaccagggatgaaaacgagaaactggaatactatgagaagttccagatcatcgaaaacgtgtttaagcagaagaaaaagcctacactgaaacagattgctaaggagatcctggtcaacgaagaggacatcaagggctaccgggtgacaagcactggaaaaccagagttcaccaatctgaaagtgtatcacgatattaaggacatcacagcacggaaagaaatcattgagaacgccgaactgctggatcagattgctaagatcctgactatctaccagagctccgaggacatccaggaagagctgactaacctgaacagcgagctgacccaggaagagatcgaacagattagtaatctgaaggggtacaccggaacacacaacctgtccctgaaagctatcaatctgattctggatgagctgtggcatacaaacgacaatcagattgcaatctttaaccggctgaagctggtcccaaaaaaggtggacctgagtcagcagaaagagatcccaaccacactggtggacgatttcattctgtcacccgtggtcaagcggagcttcatccagagcatcaaagtgatcaacgccatcatcaagaagtacggcctgcccaatgatatcattatcgagctggctagggagaagaacagcaaggacgcacagaagatgatcaatgagatgcagaaacgaaaccggcagaccaatgaacgcattgaagagattatccgaactaccgggaaagagaacgcaaagtacctgattgaaaaaatcaagctgcacgatatgcaggagggaaagtgtctgtattctctggaggccatccccctggaggacctgctgaacaatccattcaactacgaggtcgatcatattatccccagaagcgtgtccttcgacaattcctttaacaacaaggtgctggtcaagcaggaagagaactctaaaaagggcaataggactcctttccagtacctgtctagttcagattccaagatctcttacgaaacctttaaaaagcacattctgaatctggccaaaggaaagggccgcatcagcaagaccaaaaaggagtacctgctggaagagcgggacatcaacagattctccgtccagaaggattttattaaccggaatctggtggacacaagatacgctactcgcggcctgatgaatctgctgcgatcctatttccgggtgaacaatctggatgtgaaagtcaagtccatcaacggcgggttcacatcttttctgaggcgcaaatggaagtttaaaaaggagcgcaacaaagggtacaagcaccatgccgaagatgctctgattatcgcaaatgccgacttcatctttaaggagtggaaaaagctggacaaagccaagaaagtgatggagaaccagatgttcgaagagaagcaggccgaatctatgcccgaaatcgagacagaacaggagtacaaggagattttcatcactcctcaccagatcaagcatatcaaggatttcaaggactacaagtactctcaccgggtggataaaaagcccaacagagagctgatcaatgacaccctgtatagtacaagaaaagacgataaggggaataccctgattgtgaacaatctgaacggactgtacgacaaagataatgacaagctgaaaaagctgatcaacaaaagtcccgagaagctgctgatgtaccaccatgatcctcagacatatcagaaactgaagctgattatggagcagtacggcgacgagaagaacccactgtataagtactatgaagagactgggaactacctgaccaagtatagcaaaaaggataatggccccgtgatcaagaagatcaagtactatgggaacaagctgaatgcccatctggacatcacagacgattaccctaacagtcgcaacaaggtggtcaagctgtcactgaagccatacagattcgatgtctatctggacaacggcgtgtataaatttgtgactgtcaagaatctggatgtcatcaaaaaggagaactactatgaagtgaatagcaagtgctacgaagaggctaaaaagctgaaaaagattagcaaccaggcagagttcatcgcctccttttacaacaacgacctgattaagatcaatggcgaactgtatagggtcatcggggtgaacaatgatctgctgaaccgcattgaagtgaatatgattgacatcacttaccgagagtatctggaaaacatgaatgataagcgcccccctcgaattatcaaaacaattgcctctaagactcagagtatcaaaaagtactcaaccgacattctgggaaacctgtatgaggtgaagagcaaaaagcaccctcagattatcaaaaagggcggatcccccaagaagaagaggaaagtctcgagcgactacaaagaccatgacggtgattataaagatcatgacatcgattacaaggatgacgatgacaagtagcaataaaggatcgtttattttcattggaagcgtgtgttggttttttgatcaggcgcgtccaagcttcgcaggaaagaacatgtgagcaaaaggccagcaaaaggcgttaactctagatttaaatgcatgctggggagagatctaggaacccctagtgatggagttggccactccctctctgcgcgctcgctcgctcactgaggccgcccgggcaaagcccgggcgtcgggcgacctttggtcgcccggcctcagtgagcgagcgagcgcgcagagagggagtggccaa

SEQ ID NO: 434 - protein, 7 aa, synthetic construct
  VAR_SEQ 1..7: note = Exemplary N-ter NLS
PKKKRKV

SEQ ID NO: 435 - skipped

SEQ ID NO: 436 - DNA, 143 bp, synthetic construct
  misc_feature 1..143: note = AAV1 right ITR sequence
  source 1..143: mol_type = other DNA
ttacccctagtgatggagttgcccactccctctctgcgcgctcgctcgctcggtggggccggcagagcagagctctgccgtctgcggacctttggtccgcaggccccaccgagcgagcgagcgcgcagagagggagtgggcaa

SEQ ID NO: 437 - DNA, 145 bp, synthetic construct
  misc_feature 1..145: note = AAV2 right ITR sequence
  source 1..145: mol_type = other DNA
aggaacccctagtgatggagttggccactccctctctgcgcgctcgctcgctcactgaggccgcccgggcaaagcccgggcgtcgggcgacctttggtcgcccggcctcagtgagcgagcgagcgcgcagagagggagtggccaa

SEQ ID NO: 438 - DNA, 142 bp, synthetic construct
  misc_feature 1..142: note = AAV3B right ITR sequence
  source 1..142: mol_type = other DNA
atacctctagtgatggagttggccactccctctatgcgcactcgctcgctcggtggggccggacgtgcaaagcacgtccgtctggcgacctttggtcgccaggccccaccgagcgagcgagtgcgcatagagggagtggcca

SEQ ID NO: 439 - DNA, 146 bp, synthetic construct
  misc_feature 1..146: note = AAV4 right ITR sequence
  source 1..146: mol_type = other DNA
gggcaaacctagatgatggagttggccactccctctatgcgcgctcgctcactcactcggccctgccggccagaggccggcagtctggagacctttggtctccagggccgagtgagtgagcgagcgcgcatagagggagtggccaa

SEQ ID NO: 440 - DNA, 155 bp, synthetic construct
  misc_feature 1..155: note = AAV5 right ITR sequence
  source 1..155: mol_type = other DNA
ttgcttgagagtgtggcactctcccccctgtcgcgttcgctcgctcgctggctcgtttgggggggcgacggccagagggccgtcgtctggcagctctttgagctgccacccccccaaacgagccagcgagcgagcgaacgcgacaggggggagag

SEQ ID NO: 441 - DNA, 143 bp, synthetic construct
  misc_feature 1..143: note = AAV6 right ITR sequence
  source 1..143: mol_type = other DNA
ttgcccactccctctatgcgcgctcgctcgctcggtggggcctgcggaccaaaggtccgcagacggcagagctctgctctgccggccccaccgagcgagcgagcgcgcatagagggagtgggcaactccatcactaggggtat

SEQ ID NO: 442 - DNA, 145 bp, synthetic construct
  misc_feature 1..145: note = AAV7 right ITR sequence
  source 1..145: mol_type = other DNA
cggtacccctagtgatggagttggccactccctctatgcgcgctcgctcgctcggtggggccggcagagcagagctctgccgtctgcggacctttggtccgcaggccccaccgagcgagcgagcgcgcatagagggagtggccaa

SEQ ID NO: 443 - DNA, 145 bp, synthetic construct
  misc_feature 1..145: note = AAV8 right ITR sequence
  source 1..145: mol_type = other DNA
ggtgtcgcaaaatgccgcaaaagcactcacgtgacagctaatacaggaccactcccctatgacgtaatttacgtcagcgctgacgcggcagcgtgggaggcgcttcgcgctacccctagtgatggagttggccactccctctctg

SEQ ID NO: 444 - DNA, 145 bp, synthetic construct
  misc_feature 1..145: note = AAV9 right ITR sequence
  source 1..145: mol_type = other DNA
gtgtcgcaaaatgtcgcaaaagcactcacgtgacagctaatacaggaccactcccctatgacgtaatctacgtcagcgctgacgcggcagcgtgggaggcgcttcgcgattacccctagtgatggagttggccactccctctctg

SEQ ID NO: 445 - DNA, 5217 bp, synthetic construct
  misc_feature 1..5217: note = Exemplary recombinant AAV genome containing CMV promoter (3'->5' lower strand)
  misc_difference 4372..4397: note = a, c, g, or t
  misc_difference 4764..4789: note = a, c, g, or t
  source 1..5217: mol_type = other DNA
ttggccactccctctctgcgcgctcgctcgctcactgaggccgggcgaccaaaggtcgcccgacgcccgggctttgcccgggcggcctcagtgagcgagcgagcgcgcagagagggagtggccaactccatcactaggggttcctagatctctccccagcatgcatttaaatctagagttaacgccttttgctggccttttgctcacatgttctttcctgcgaagcttggacgcgcctgatcaaaaaaccaacacacgcttccaatgaaaataaacgatcctttattgctacttgtcatcgtcatccttgtaatcgatgtcatgatctttataatcaccgtcatggtctttgtagtcgctcgagactttcctcttcttcttgggggatccgccctttttgataatctgagggtgctttttgctcttcacctcatacaggtttcccagaatgtcggttgagtactttttgatactctgagtcttagaggcaattgttttgataattcgaggggggcgcttatcattcatgttttccagatactctcggtaagtgatgtcaatcatattcacttcaatgcggttcagcagatcattgttcaccccgatgaccctatacagttcgccattgatcttaatcaggtcgttgttgtaaaaggaggcgatgaactctgcctggttgctaatctttttcagctttttagcctcttcgtagcacttgctattcacttcatagtagttctcctttttgatgacatccagattcttgacagtcacaaatttatacacgccgttgtccagatagacatcgaatctgtatggcttcagtgacagcttgaccaccttgttgcgactgttagggtaatcgtctgtgatgtccagatgggcattcagcttgttcccatagtacttgatcttcttgatcacggggccattatcctttttgctatacttggtcaggtagttcccagtctcttcatagtacttatacagtgggttcttctcgtcgccgtactgctccataatcagcttcagtttctgatatgtctgaggatcatggtggtacatcagcagcttctcgggacttttgttgatcagctttttcagcttgtcattatctttgtcgtacagtccgttcagattgttcacaatcagggtattccccttatcgtcttttcttgtactatacagggtgtcattgatcagctctctgttgggctttttatccacccggtgagagtacttgtagtccttgaaatccttgatatgcttgatctggtgaggagtgatgaaaatctccttgtactcctgttctgtctcgatttcgggcatagattcggcctgcttctcttcgaacatctggttctccatcactttcttggctttgtccagctttttccactccttaaagatgaagtcggcatttgcgataatcagagcatcttcggcatggtgcttgtaccctttgttgcgctcctttttaaacttccatttgcgcctcagaaaagatgtgaacccgccgttgatggacttgactttcacatccagattgttcacccggaaataggatcgcagcagattcatcaggccgcgagtagcgtatcttgtgtccaccagattccggttaataaaatccttctggacggagaatctgttgatgtcccgctcttccagcaggtactcctttttggtcttgctgatgcggccctttcctttggccagattcagaatgtgctttttaaaggtttcgtaagagatcttggaatctgaactagacaggtactggaaaggagtcctattgccctttttagagttctcttcctgcttgaccagcaccttgttgttaaaggaattgtcgaaggacacgcttctggggataatatgatcgacctcgtagttgaatggattgttcagcaggtcctccagggggatggcctccagagaatacagacactttccctcctgcatatcgtgcagcttgattttttcaatcaggtactttgcgttctctttcccggtagttcggataatctcttcaatgcgttcattggtctgccggtttcgtttctgcatctcattgatcatcttctgtgcgtccttgctgttcttctccctagccagctcgataatgatatcattgggcaggccgtacttcttgatgatggcgttgatcactttgatgctctggatgaagctccgcttgaccacgggtgacagaatgaaatcgtccaccagtgtggttgggatctctttctgctgactcaggtccaccttttttgggaccagcttcagccggttaaagattgcaatctgattgtcgtttgtatgccacagctcatccagaatcagattgatagctttcagggacaggttgtgtgttccggtgtaccccttcagattactaatctgttcgatctcttcctgggtcagctcgctgttcaggttagtcagctcttcctggatgtcctcggagctctggtagatagtcaggatcttagcaatctgatccagcagttcggcgttctcaatgatttctttccgtgctgtgatgtccttaatatcgtgatacactttcagattggtgaactctggttttccagtgcttgtcacccggtagcccttgatgtcctcttcgttgaccaggatctccttagcaatctgtttcagtgtaggctttttcttctgcttaaacacgttttcgatgatctggaacttctcatagtattccagtttctcgttttcatccctggtgatgaccaggttgttcaggtcattcagggcgttgtacagatctgcgttataagcgtacttgacgcttctcagctcttctggaaaataggtgcaatgtcccatcagcatctcgtaccattccttgatgtctttccatccgaaggggctcccttctcctggtccctcatagtaggttctccgagtctccagcaggtcgatataagtatcgatgaagctctgatccagctggtggtaagccttctgcactttcagcagctgcttggcttctttgacgtagtcgcttgtcttgaacctattaattgaccctctcacctcgccatctttcttcagccgttccagctgcagctctgcgacatacttctcttccagagctttgctattgcgtgagatctgttcctttgtagacagctcgttgccggtgtcctcttccacctcattgacgttatgcactcctcggcgcttagccaggtgcagcagagctgcggaaaactcttcctctgacagcttctgactcaggcctttcaccctggcttcataaggattaattccactcagctcagaatggtcggtcagcaggttgtaatcgaacagcagtttcttcaccctctggattctgtgccttctccgtcgtttcaggcgcctggctcccctcttgcttctccgtccctcattgttttccacgttggcctccttgaacagtctgacgcctgcgtcgatcacgtcccttgtttcatagtcaataatcccataccccacgcttgtaatcccgatgtccagccccagaatgtagttccttttcatggacgcttcgaccttgcgctttttcttcggcatggtggcggctctccctatagtgagtcgtattagcggccgcgcggatctctagcggatctgacggttcactaaaccagctctgcttatatagacctcccaccgtacacgcctaccgcccatttgcgtcaatggggcggagttgttacgacattttggaaagtcccgttgattttggtgccaaaacaaactcccattgacgtcaatggggtggagacttggaaatccccgtgagtcaaaccgctatccacgcccattgatgtactgccaaaaccgcatcaccatggtaatagcgatgactaatacgtagatgtactgccaagtaggaaagtcccataaggtcatgtactgggcataatgccaggcgggccatttaccgtcattgacgtcaatagggggcgtacttggcatatgatacacttgatgtactgccaagtgggcagtttaccgtaaatagtccacccattgacgtcaatggaaagtccctattggcgttactatgggaacatacgtcattattgacgtcaatgggcgggggtcgttgggcggtcagccaggcgggccatttaccgtaagttatgtaacgcggaactccatatatgggctatgaactaatgaccccgtaattgattactattaataactagtcaataatcaatgtcaacgcgtatatctggcccgtacatcgcgacttaagcgctagcggtaccaaaaaatctcgccaacaagttgacgagataaacacggcattttgccttgttttagtagattctgtttccagagtactaaaacnnnnnnnnnnnnnnnnnnnnnnnnnnggtgtttcgtcctttccacaagatatataaagccaagaaatcgaaatactttcaagttacggtaagcatatgatagtccattttaaaacataattttaaaactgcaaactacccaagaaattattactttctacgtcacgtattttgtactaatatctttgtgtttacagtcaaattaattctaattatctctctaacagccttgtatcgtatatgcaaatatgaaggaatcatgggaaataggccctcttcctgcccgaccttccttcgatcgaactaagtcgaaaaaatctcgccaacaagttgacgagataaacacggcattttgccttgttttagtagattctgtttccagagtactaaaacnnnnnnnnnnnnnnnnnnnnnnnnnnggtgtttcgtcctttccacaagatatataaagccaagaaatcgaaatactttcaagttacggtaagcatatgatagtccattttaaaacataattttaaaactgcaaactacccaagaaattattactttctacgtcacgtattttgtactaatatctttgtgtttacagtcaaattaattctaattatctctctaacagccttgtatcgtatatgcaaatatgaaggaatcatgggaaataggccctcttcctgcccgaccttggtaccgaattcagatctgaggaacccctagtgatggagttggccactccctctctgcgcgctcgctcgctcactgaggccgcccgggcaaagcccgggcgtcgggcgacctttggtcgcccggcctcagtgagcgagcgagcgcgcagagagggagtggccaa

SEQ ID NO: 446 - DNA, 4870 bp, synthetic construct
  misc_feature 1..4870: note = Exemplary recombinant AAV genome containing EFS promoter (3'->5' lower strand)
  misc_difference 4025..4050: note = a, c, g, or t
  misc_difference 4417..4442: note = a, c, g, or t
  source 1..4870: mol_type = other DNA
ttggccactccctctctgcgcgctcgctcgctcactgaggccgggcgaccaaaggtcgcccgacgcccgggctttgcccgggcggcctcagtgagcgagcgagcgcgcagagagggagtggccaactccatcactaggggttcctagatctctccccagcatgcatttaaatctagagttaacgccttttgctggccttttgctcacatgttctttcctgcgaagcttggacgcgcctgatcaaaaaaccaacacacgcttccaatgaaaataaacgatcctttattgctacttgtcatcgtcatccttgtaatcgatgtcatgatctttataatcaccgtcatggtctttgtagtcgctcgagactttcctcttcttcttgggggatccgccctttttgataatctgagggtgctttttgctcttcacctcatacaggtttcccagaatgtcggttgagtactttttgatactctgagtcttagaggcaattgttttgataattcgaggggggcgcttatcattcatgttttccagatactctcggtaagtgatgtcaatcatattcacttcaatgcggttcagcagatcattgttcaccccgatgaccctatacagttcgccattgatcttaatcaggtcgttgttgtaaaaggaggcgatgaactctgcctggttgctaatctttttcagctttttagcctcttcgtagcacttgctattcacttcatagtagttctcctttttgatgacatccagattcttgacagtcacaaatttatacacgccgttgtccagatagacatcgaatctgtatggcttcagtgacagcttgaccaccttgttgcgactgttagggtaatcgtctgtgatgtccagatgggcattcagcttgttcccatagtacttgatcttcttgatcacggggccattatcctttttgctatacttggtcaggtagttcccagtctcttcatagtacttatacagtgggttcttctcgtcgccgtactgctccataatcagcttcagtttctgatatgtctgaggatcatggtggtacatcagcagcttctcgggacttttgttgatcagctttttcagcttgtcattatctttgtcgtacagtccgttcagattgttcacaatcagggtattccccttatcgtcttttcttgtactatacagggtgtcattgatcagctctctgttgggctttttatccacccggtgagagtacttgtagtccttgaaatccttgatatgcttgatctggtgaggagtgatgaaaatctccttgtactcctgttctgtctcgatttcgggcatagattcggcctgcttctcttcgaacatctggttctccatcactttcttggctttgtccagctttttccactccttaaagatgaagtcggcatttgcgataatcagagcatcttcggcatggtgcttgtaccctttgttgcgctcctttttaaacttccatttgcgcctcagaaaagatgtgaacccgccgttgatggacttgactttcacatccagattgttcacccggaaataggatcgcagcagattcatcaggccgcgagtagcgtatcttgtgtccaccagattccggttaataaaatccttctggacggagaatctgttgatgtcccgctcttccagcaggtactcctttttggtcttgctgatgcggccctttcctttggccagattcagaatgtgctttttaaaggtttcgtaagagatcttggaatctgaactagacaggtactggaaaggagtcctattgccctttttagagttctcttcctgcttgaccagcaccttgttgttaaaggaattgtcgaaggacacgcttctggggataatatgatcgacctcgtagttgaatggattgttcagcaggtcctccagggggatggcctccagagaatacagacactttccctcctgcatatcgtgcagcttgattttttcaatcaggtactttgcgttctctttcccggtagttcggataatctcttcaatgcgttcattggtctgccggtttcgtttctgcatctcattgatcatcttctgtgcgtccttgctgttcttctccctagccagctcgataatgatatcattgggcaggccgtacttcttgatgatggcgttgatcactttgatgctctggatgaagctccgcttgaccacgggtgacagaatgaaatcgtccaccagtgtggttgggatctctttctgctgactcaggtccaccttttttgggaccagcttcagccggttaaagattgcaatctgattgtcgtttgtatgccacagctcatccagaatcagattgatagctttcagggacaggttgtgtgttccggtgtaccccttcagattactaatctgttcgatctcttcctgggtcagctcgctgttcaggttagtcagctcttcctggatgtcctcggagctctggtagatagtcaggatcttagcaatctgatccagcagttcggcgttctcaatgatttctttccgtgctgtgatgtccttaatatcgtgatacactttcagattggtgaactctggttttccagtgcttgtcacccggtagcccttgatgtcctcttcgttgaccaggatctccttagcaatctgtttcagtgtaggctttttcttctgcttaaacacgttttcgatgatctggaacttctcatagtattccagtttctcgttttcatccctggtgatgaccaggttgttcaggtcattcagggcgttgtacagatctgcgttataagcgtacttgacgcttctcagctcttctggaaaataggtgcaatgtcccatcagcatctcgtaccattccttgatgtctttccatccgaaggggctcccttctcctggtccctcatagtaggttctccgagtctccagcaggtcgatataagtatcgatgaagctctgatccagctggtggtaagccttctgcactttcagcagctgcttggcttctttgacgtagtcgcttgtcttgaacctattaattgaccctctcacctcgccatctttcttcagccgttccagctgcagctctgcgacatacttctcttccagagctttgctattgcgtgagatctgttcctttgtagacagctcgttgccggtgtcctcttccacctcattgacgttatgcactcctcggcgcttagccaggtgcagcagagctgcggaaaactcttcctctgacagcttctgactcaggcctttcaccctggcttcataaggattaattccactcagctcagaatggtcggtcagcaggttgtaatcgaacagcagtttcttcaccctctggattctgtgccttctccgtcgtttcaggcgcctggctcccctcttgcttctccgtccctcattgttttccacgttggcctccttgaacagtctgacgcctgcgtcgatcacgtcccttgtttcatagtcaataatcccataccccacgcttgtaatcccgatgtccagccccagaatgtagttccttttcatggacgcttcgaccttgcgctttttcttcggcatggtggcggctctccctatagtgagtcgtattagcggccgcccgcggtcacgacacctgtgttctggcggcaaacccgttgcgaaaaagaacgttcacggcgactactgcacttatatacggttctcccccaccctcgggaaaaaggcggagccagtacacgacatcactttcccagtttaccccgcgccaccttctctaggcaccggttcaattgccgacccctccccccaacttctcggggactgtgggcgatgtgcgctctgcccactgacgggcaccggagccactcgaactagtcaataatcaatgtcaacgcgtatatctggcccgtacatcgcgacttaagcgctagcggtaccaaaaaatctcgccaacaagttgacgagataaacacggcattttgccttgttttagtagattctgtttccagagtactaaaacnnnnnnnnnnnnnnnnnnnnnnnnnnggtgtttcgtcctttccacaagatatataaagccaagaaatcgaaatactttcaagttacggtaagcatatgatagtccattttaaaacataattttaaaactgcaaactacccaagaaattattactttctacgtcacgtattttgtactaatatctttgtgtttacagtcaaattaattctaattatctctctaacagccttgtatcgtatatgcaaatatgaaggaatcatgggaaataggccctcttcctgcccgaccttccttcgatcgaactaagtcgaaaaaatctcgccaacaagttgacgagataaacacggcattttgccttgttttagtagattctgtttccagagtactaaaacnnnnnnnnnnnnnnnnnnnnnnnnnnggtgtttcgtcctttccacaagatatataaagccaagaaatcgaaatactttcaagttacggtaagcatatgatagtccattttaaaacataattttaaaactgcaaactacccaagaaattattactttctacgtcacgtattttgtactaatatctttgtgtttacagtcaaattaattctaattatctctctaacagccttgtatcgtatatgcaaatatgaaggaatcatgggaaataggccctcttcctgcccgaccttggtaccgaattcagatctgaggaacccctagtgatggagttggccactccctctctgcgcgctcgctcgctcactgaggccgcccgggcaaagcccgggcgtcgggcgacctttggtcgcccggcctcagtgagcgagcgagcgcgcagagagggagtggccaa

SEQ ID NO: 447 - DNA, 4862 bp, synthetic construct
  misc_feature 1..4862: note = Exemplary recombinant AAV genome containing CRK1 promoter (3'->5' lower strand)
  misc_difference 4409..4434: note = a, c, g, or t
  source 1..4862: mol_type = other DNA
ttggccactccctctctgcgcgctcgctcgctcactgaggccgggcgaccaaaggtcgcccgacgcccgggctttgcccgggcggcctcagtgagcgagcgagcgcgcagagagggagtggccaactccatcactaggggttcctagatctctccccagcatgcatttaaatctagagttaacgccttttgctggccttttgctcacatgttctttcctgcgaagcttggacgcgcctgatcaaaaaaccaacacacgcttccaatgaaaataaacgatcctttattgctacttgtcatcgtcatccttgtaatcgatgtcatgatctttataatcaccgtcatggtctttgtagtcgctcgagactttcctcttcttcttgggggatccgccctttttgataatctgagggtgctttttgctcttcacctcatacaggtttcccagaatgtcggttgagtactttttgatactctgagtcttagaggcaattgttttgataattcgaggggggcgcttatcattcatgttttccagatactctcggtaagtgatgtcaatcatattcacttcaatgcggttcagcagatcattgttcaccccgatgaccctatacagttcgccattgatcttaatcaggtcgttgttgtaaaaggaggcgatgaactctgcctggttgctaatctttttcagctttttagcctcttcgtagcacttgctattcacttcatagtagttctcctttttgatgacatccagattcttgacagtcacaaatttatacacgccgttgtccagatagacatcgaatctgtatggcttcagtgacagcttgaccaccttgttgcgactgttagggtaatcgtctgtgatgtccagatgggcattcagcttgttcccatagtacttgatcttcttgatcacggggccattatcctttttgctatacttggtcaggtagttcccagtctcttcatagtacttatacagtgggttcttctcgtcgccgtactgctccataatcagcttcagtttctgatatgtctgaggatcatggtggtacatcagcagcttctcgggacttttgttgatcagctttttcagcttgtcattatctttgtcgtacagtccgttcagattgttcacaatcagggtattccccttatcgtcttttcttgtactatacagggtgtcattgatcagctctctgttgggctttttatccacccggtgagagtacttgtagtccttgaaatccttgatatgcttgatctggtgaggagtgatgaaaatctccttgtactcctgttctgtctcgatttcgggcatagattcggcctgcttctcttcgaacatctggttctccatcactttcttggctttgtccagctttttccactccttaaagatgaagtcggcatttgcgataatcagagcatcttcggcatggtgcttgtaccctttgttgcgctcctttttaaacttccatttgcgcctcagaaaagatgtgaacccgccgttgatggacttgactttcacatccagattgttcacccggaaataggatcgcagcagattcatcaggccgcgagtagcgtatcttgtgtccaccagattccggttaataaaatccttctggacggagaatctgttgatgtcccgctcttccagcaggtactcctttttggtcttgctgatgcggccctttcctttggccagattcagaatgtgctttttaaaggtttcgtaagagatcttggaatctgaactagacaggtactggaaaggagtcctattgccctttttagagttctcttcctgcttgaccagcaccttgttgttaaaggaattgtcgaaggacacgcttctggggataatatgatcgacctcgtagttgaatggattgttcagcaggtcctccagggggatggcctccagagaatacagacactttccctcctgcatatcgtgcagcttgattttttcaatcaggtactttgcgttctctttcccggtagttcggataatctcttcaatgcgttcattggtctgccggtttcgtttctgcatctcattgatcatcttctgtgcgtccttgctgttcttctccctagccagctcgataatgatatcattgggcaggccgtacttcttgatgatggcgttgatcactttgatgctctggatgaagctccgcttgaccacgggtgacagaatgaaatcgtccaccagtgtggttgggatctctttctgctgactcaggtccaccttttttgggaccagcttcagccggttaaagattgcaatctgattgtcgtttgtatgccacagctcatccagaatcagattgatagctttcagggacaggttgtgtgttccggtgtaccccttcagattactaatctgttcgatctcttcctgggtcagctcgctgttcaggttagtcagctcttcctggatgtcctcggagctctggtagatagtcaggatcttagcaatctgatccagcagttcggcgttctcaatgatttctttccgtgctgtgatgtccttaatatcgtgatacactttcagattggtgaactctggttttccagtgcttgtcacccggtagcccttgatgtcctcttcgttgaccaggatctccttagcaatctgtttcagtgtaggctttttcttctgcttaaacacgttttcgatgatctggaacttctcatagtattccagtttctcgttttcatccctggtgatgaccaggttgttcaggtcattcagggcgttgtacagatctgcgttataagcgtacttgacgcttctcagctcttctggaaaataggtgcaatgtcccatcagcatctcgtaccattccttgatgtctttccatccgaaggggctcccttctcctggtccctcatagtaggttctccgagtctccagcaggtcgatataagtatcgatgaagctctgatccagctggtggtaagccttctgcactttcagcagctgcttggcttctttgacgtagtcgcttgtcttgaacctattaattgaccctctcacctcgccatctttcttcagccgttccagctgcagctctgcgacatacttctcttccagagctttgctattgcgtgagatctgttcctttgtagacagctcgttgccggtgtcctcttccacctcattgacgttatgcactcctcggcgcttagccaggtgcagcagagctgcggaaaactcttcctctgacagcttctgactcaggcctttcaccctggcttcataaggattaattccactcagctcagaatggtcggtcagcaggttgtaatcgaacagcagtttcttcaccctctggattctgtgccttctccgtcgtttcaggcgcctggctcccctcttgcttctccgtccctcattgttttccacgttggcctccttgaacagtctgacgcctgcgtcgatcacgtcccttgtttcatagtcaataatcccataccccacgcttgtaatcccgatgtccagccccagaatgtagttccttttcatggacgcttcgaccttgcgctttttcttcggcatggtggcggctctccctatagtgagtcgtattagcggccgcgcccttggcctgtggcccgtccctgcccttgctggacgagagagaccgggccctgtcgagggttcctggggaccactgggaagcccctgggagaccggggctgacacagcaccaggcgaaatcccagccggggtcacggaggacgcttaggagtggcaagaaggtgctagaaaaagacaatcccctgagctgcttggaatccgattagatcattctgcccggccccttcctccaaggggccgcctcacttttcccctgagaaggacaaacaaccaccaggcttctggggcccactagtcaataatcaatgtcaacgcgtatatctggcccgtacatcgcgacttaagcgctagcggtaccaaaaaatctcgccaacaagttgacgagataaacacggcattttgccttgttttagtagatggtgtttcgtcctttccacaagatatataaagccaagaaatcgaaatactttcaagttacggtaagcatatgatagtccattttaaaacataattttaaaactgcaaactacccaagaaattattactttctacgtcacgtattttgtactaatatctttgtgtttacagtcaaattaattctaattatctctctaacagccttgtatcgtatatgcaaatatgaaggaatcatgggaaataggccctcttcctgcccgaccttccttcgatcgaactaagtcgaaaaaatctcgccaacaagttgacgagataaacacggcattttgccttgttttagtagattctgtttccagagtactaaaacnnnnnnnnnnnnnnnnnnnnnnnnnnggtgtttcgtcctttccacaagatatataaagccaagaaatcgaaatactttcaagttacggtaagcatatgatagtccattttaaaacataattttaaaactgcaaactacccaagaaattattactttctacgtcacgtattttgtactaatatctttgtgtttacagtcaaattaattctaattatctctctaacagccttgtatcgtatatgcaaatatgaaggaatcatgggaaataggccctcttcctgcccgaccttggtaccgaattcagatctgaggaacccctagtgatggagttggccactccctctctgcgcgctcgctcgctcactgaggccgcccgggcaaagcccgggcgtcgggcgacctttggtcgcccggcctcagtgagcgagcgagcgcgcagagagggagtggccaa

SEQ ID NO: 448 - DNA, 4731 bp, synthetic construct
  misc_feature 1..4731: note = Exemplary recombinant AAV genome containing CRX promoter (3'->5' lower strand)
  misc_difference 3886..3911: note = a, c, g, or t
  misc_difference 4278..4303: note = a, c, g, or t
  source 1..4731: mol_type = other DNA
ttggccactccctctctgcgcgctcgctcgctcactgaggccgggcgaccaaaggtcgcccgacgcccgggctttgcccgggcggcctcagtgagcgagcgagcgcgcagagagggagtggccaactccatcactaggggttcctagatctctccccagcatgcatttaaatctagagttaacgccttttgctggccttttgctcacatgttctttcctgcgaagcttggacgcgcctgatcaaaaaaccaacacacgcttccaatgaaaataaacgatcctttattgctacttgtcatcgtcatccttgtaatcgatgtcatgatctttataatcaccgtcatggtctttgtagtcgctcgagactttcctcttcttcttgggggatccgccctttttgataatctgagggtgctttttgctcttcacctcatacaggtttcccagaatgtcggttgagtactttttgatactctgagtcttagaggcaattgttttgataattcgaggggggcgcttatcattcatgttttccagatactctcggtaagtgatgtcaatcatattcacttcaatgcggttcagcagatcattgttcaccccgatgaccctatacagttcgccattgatcttaatcaggtcgttgttgtaaaaggaggcgatgaactctgcctggttgctaatctttttcagctttttagcctcttcgtagcacttgctattcacttcatagtagttctcctttttgatgacatccagattcttgacagtcacaaatttatacacgccgttgtccagatagacatcgaatctgtatggcttcagtgacagcttgaccaccttgttgcgactgttagggtaatcgtctgtgatgtccagatgggcattcagcttgttcccatagtacttgatcttcttgatcacggggccattatcctttttgctatacttggtcaggtagttcccagtctcttcatagtacttatacagtgggttcttctcgtcgccgtactgctccataatcagcttcagtttctgatatgtctgaggatcatggtggtacatcagcagcttctcgggacttttgttgatcagctttttcagcttgtcattatctttgtcgtacagtccgttcagattgttcacaatcagggtattccccttatcgtcttttcttgtactatacagggtgtcattgatcagctctctgttgggctttttatccacccggtgagagtacttgtagtccttgaaatccttgatatgcttgatctggtgaggagtgatgaaaatctccttgtactcctgttctgtctcgatttcgggcatagattcggcctgcttctcttcgaacatctggttctccatcactttcttggctttgtccagctttttccactccttaaagatgaagtcggcatttgcgataatcagagcatcttcggcatggtgcttgtaccctttgttgcgctcctttttaaacttccatttgcgcctcagaaaagatgtgaacccgccgttgatggacttgactttcacatccagattgttcacccggaaataggatcgcagcagattcatcaggccgcgagtagcgtatcttgtgtccaccagattccggttaataaaatccttctggacggagaatctgttgatgtcccgctcttccagcaggtactcctttttggtcttgctgatgcggccctttcctttggccagattcagaatgtgctttttaaaggtttcgtaagagatcttggaatctgaactagacaggtactggaaaggagtcctattgccctttttagagttctcttcctgcttgaccagcaccttgttgttaaaggaattgtcgaaggacacgcttctggggataatatgatcgacctcgtagttgaatggattgttcagcaggtcctccagggggatggcctccagagaatacagacactttccctcctgcatatcgtgcagcttgattttttcaatcaggtactttgcgttctctttcccggtagttcggataatctcttcaatgcgttcattggtctgccggtttcgtttctgcatctcattgatcatcttctgtgcgtccttgctgttcttctccctagccagctcgataatgatatcattgggcaggccgtacttcttgatgatggcgttgatcactttgatgctctggatgaagctccgcttgaccacgggtgacagaatgaaatcgtccaccagtgtggttgggatctctttctgctgactcaggtccaccttttttgggaccagcttcagccggttaaagattgcaatctgattgtcgtttgtatgccacagctcatccagaatcagattgatagctttcagggacaggttgtgtgttccggtgtaccccttcagattactaatctgttcgatctcttcctgggtcagctcgctgttcaggttagtcagctcttcctggatgtcctcggagctctggtagatagtcaggatcttagcaatctgatccagcagttcggcgttctcaatgatttctttccgtgctgtgatgtccttaatatcgtgatacactttcagattggtgaactctggttttccagtgcttgtcacccggtagcccttgatgtcctcttcgttgaccaggatctccttagcaatctgtttcagtgtaggctttttcttctgcttaaacacgttttcgatgatctggaacttctcatagtattccagtttctcgttttcatccctggtgatgaccaggttgttcaggtcattcagggcgttgtacagatctgcgttataagcgtacttgacgcttctcagctcttctggaaaataggtgcaatgtcccatcagcatctcgtaccattccttgatgtctttccatccgaaggggctcccttctcctggtccctcatagtaggttctccgagtctccagcaggtcgatataagtatcgatgaagctctgatccagctggtggtaagccttctgcactttcagcagctgcttggcttctttgacgtagtcgcttgtcttgaacctattaattgaccctctcacctcgccatctttcttcagccgttccagctgcagctctgcgacatacttctcttccagagctttgctattgcgtgagatctgttcctttgtagacagctcgttgccggtgtcctcttccacctcattgacgttatgcactcctcggcgcttagccaggtgcagcagagctgcggaaaactcttcctctgacagcttctgactcaggcctttcaccctggcttcataaggattaattccactcagctcagaatggtcggtcagcaggttgtaatcgaacagcagtttcttcaccctctggattctgtgccttctccgtcgtttcaggcgcctggctcccctcttgcttctccgtccctcattgttttccacgttggcctccttgaacagtctgacgcctgcgtcgatcacgtcccttgtttcatagtcaataatcccataccccacgcttgtaatcccgatgtccagccccagaatgtagttccttttcatggacgcttcgaccttgcgctttttcttcggcatggtggcggctctccctatagtgagtcgtattagcggccgccgcccggtaatccctccttgtggctgggtcattgtgtctcagccataaggggccctttctttctcctcctccctcccccaaaccccctgctaggagagattaaggctacaggcactagtcaataatcaatgtcaacgcgtatatctggcccgtacatcgcgacttaagcgctagcggtaccaaaaaatctcgccaacaagttgacgagataaacacggcattttgccttgttttagtagattctgtttccagagtactaaaacnnnnnnnnnnnnnnnnnnnnnnnnnnggtgtttcgtcctttccacaagatatataaagccaagaaatcgaaatactttcaagttacggtaagcatatgatagtccattttaaaacataattttaaaactgcaaactacccaagaaattattactttctacgtcacgtattttgtactaatatctttgtgtttacagtcaaattaattctaattatctctctaacagccttgtatcgtatatgcaaatatgaaggaatcatgggaaataggccctcttcctgcccgaccttccttcgatcgaactaagtcgaaaaaatctcgccaacaagttgacgagataaacacggcattttgccttgttttagtagattctgtttccagagtactaaaacnnnnnnnnnnnnnnnnnnnnnnnnnnggtgtttcgtcctttccacaagatatataaagccaagaaatcgaaatactttcaagttacggtaagcatatgatagtccattttaaaacataattttaaaactgcaaactacccaagaaattattactttctacgtcacgtattttgtactaatatctttgtgtttacagtcaaattaattctaattatctctctaacagccttgtatcgtatatgcaaatatgaaggaatcatgggaaataggccctcttcctgcccgaccttggtaccgaattcagatctgaggaacccctagtgatggagttggccactccctctctgcgcgctcgctcgctcactgaggccgcccgggcaaagcccgggcgtcgggcgacctttggtcgcccggcctcagtgagcgagcgagcgcgcagagagggagtggccaa

SEQ ID NO: 449 - DNA, 4899 bp, synthetic construct
  misc_feature 1..4899: note = Exemplary recombinant AAV genome containing NRL promoter (3'->5' lower strand)
  misc_difference 4054..4079: note = a, c, g, or t
  misc_difference 4446..4471: note = a, c, g, or t
  source 1..4899: mol_type = other DNA
ttggccactccctctctgcgcgctcgctcgctcactgaggccgggcgaccaaaggtcgcccgacgcccgggctttgcccgggcggcctcagtgagcgagcgagcgcgcagagagggagtggccaactccatcactaggggttcctagatctctccccagcatgcatttaaatctagagttaacgccttttgctggccttttgctcacatgttctttcctgcgaagcttggacgcgcctgatcaaaaaaccaacacacgcttccaatgaaaataaacgatcctttattgctacttgtcatcgtcatccttgtaatcgatgtcatgatctttataatcaccgtcatggtctttgtagtcgctcgagactttcctcttcttcttgggggatccgccctttttgataatctgagggtgctttttgctcttcacctcatacaggtttcccagaatgtcggttgagtactttttgatactctgagtcttagaggcaattgttttgataattcgaggggggcgcttatcattcatgttttccagatactctcggtaagtgatgtcaatcatattcacttcaatgcggttcagcagatcattgttcaccccgatgaccctatacagttcgccattgatcttaatcaggtcgttgttgtaaaaggaggcgatgaactctgcctggttgctaatctttttcagctttttagcctcttcgtagcacttgctattcacttcatagtagttctcctttttgatgacatccagattcttgacagtcacaaatttatacacgccgttgtccagatagacatcgaatctgtatggcttcagtgacagcttgaccaccttgttgcgactgttagggtaatcgtctgtgatgtccagatgggcattcagcttgttcccatagtacttgatcttcttgatcacggggccattatcctttttgctatacttggtcaggtagttcccagtctcttcatagtacttatacagtgggttcttctcgtcgccgtactgctccataatcagcttcagtttctgatatgtctgaggatcatggtggtacatcagcagcttctcgggacttttgttgatcagctttttcagcttgtcattatctttgtcgtacagtccgttcagattgttcacaatcagggtattccccttatcgtcttttcttgtactatacagggtgtcattgatcagctctctgttgggctttttatccacccggtgagagtacttgtagtccttgaaatccttgatatgcttgatctggtgaggagtgatgaaaatctccttgtactcctgttctgtctcgatttcgggcatagattcggcctgcttctcttcgaacatctggttctccatcactttcttggctttgtccagctttttccactccttaaagatgaagtcggcatttgcgataatcagagcatcttcggcatggtgcttgtaccctttgttgcgctcctttttaaacttccatttgcgcctcagaaaagatgtgaacccgccgttgatggacttgactttcacatccagattgttcacccggaaataggatcgcagcagattcatcaggccgcgagtagcgtatcttgtgtccaccagattccggttaataaaatccttctggacggagaatctgttgatgtcccgctcttccagcaggtactcctttttggtcttgctgatgcggccctttcctttggccagattcagaatgtgctttttaaaggtttcgtaagagatcttggaatctgaactagacaggtactggaaaggagtcctattgccctttttagagttctcttcctgcttgaccagcaccttgttgttaaaggaattgtcgaaggacacgcttctggggataatatgatcgacctcgtagttgaatggattgttcagcaggtcctccagggggatggcctccagagaatacagacactttccctcctgcatatcgtgcagcttgattttttcaatcaggtactttgcgttctctttcccggtagttcggataatctcttcaatgcgttcattggtctgccggtttcgtttctgcatctcattgatcatcttctgtgcgtccttgctgttcttctccctagccagctcgataatgatatcattgggcaggccgtacttcttgatgatggcgttgatcactttgatgctctggatgaagctccgcttgaccacgggtgacagaatgaaatcgtccaccagtgtggttgggatctctttctgctgactcaggtccaccttttttgggaccagcttcagccggttaaagattgcaatctgattgtcgtttgtatgccacagctcatccagaatcagattgatagctttcagggacaggttgtgtgttccggtgtaccccttcagattactaatctgttcgatctcttcctgggtcagctcgctgttcaggttagtcagctcttcctggatgtcctcggagctctggtagatagtcaggatcttagcaatctgatccagcagttcggcgttctcaatgatttctttccgtgctgtgatgtccttaatatcgtgatacactttcagattggtgaactctggttttccagtgcttgtcacccggtagcccttgatgtcctcttcgttgaccaggatctccttagcaatctgtttcagtgtaggctttttcttctgcttaaacacgttttcgatgatctggaacttctcatagtattccagtttctcgttttcatccctggtgatgaccaggttgttcaggtcattcagggcgttgtacagatctgcgttataagcgtacttgacgcttctcagctcttctggaaaataggtgcaatgtcccatcagcatctcgtaccattccttgatgtctttccatccgaaggggctcccttctcctggtccctcatagtaggttctccgagtctccagcaggtcgatataagtatcgatgaagctctgatccagctggtggtaagccttctgcactttcagcagctgcttggcttctttgacgtagtcgcttgtcttgaacctattaattgaccctctcacctcgccatctttcttcagccgttccagctgcagctctgcgacatacttctcttccagagctttgctattgcgtgagatctgttcctttgtagacagctcgttgccggtgtcctcttccacctcattgacgttatgcactcctcggcgcttagccaggtgcagcagagctgcggaaaactcttcctctgacagcttctgactcaggcctttcaccctggcttcataaggattaattccactcagctcagaatggtcggtcagcaggttgtaatcgaacagcagtttcttcaccctctggattctgtgccttctccgtcgtttcaggcgcctggctcccctcttgcttctccgtccctcattgttttccacgttggcctccttgaacagtctgacgcctgcgtcgatcacgtcccttgtttcatagtcaataatcccataccccacgcttgtaatcccgatgtccagccccagaatgtagttccttttcatggacgcttcgaccttgcgctttttcttcggcatggtggcggctctccctatagtgagtcgtattagcggccgcttaagcgggtcgctgcagggtcgctcggtgttcgaggccacacgcgtcaccttaatatgcgaatgtgtgtgtctctgcccctctctcctctctcactcattctagttcccagatggctgaggggtgacctacattttcagcctaatcccctaacacctcttagagctatcatccctgagtaggagtgggaacagggatactaggaattatccaaggagatgtttaaacctgtccgaagctgtttaaatagggtctatggagttaaaggccacttcctacctactagtcaataatcaatgtcaacgcgtatatctggcccgtacatcgcgacttaagcgctagcggtaccaaaaaatctcgccaacaagttgacgagataaacacggcattttgccttgttttagtagattctgtttccagagtactaaaacnnnnnnnnnnnnnnnnnnnnnnnnnnggtgtttcgtcctttccacaagatatataaagccaagaaatcgaaatactttcaagttacggtaagcatatgatagtccattttaaaacataattttaaaactgcaaactacccaagaaattattactttctacgtcacgtattttgtactaatatctttgtgtttacagtcaaattaattctaattatctctctaacagccttgtatcgtatatgcaaatatgaaggaatcatgggaaataggccctcttcctgcccgaccttccttcgatcgaactaagtcgaaaaaatctcgccaacaagttgacgagataaacacggcattttgccttgttttagtagattctgtttccagagtactaaaacnnnnnnnnnnnnnnnnnnnnnnnnnnggtgtttcgtcctttccacaagatatataaagccaagaaatcgaaatactttcaagttacggtaagcatatgatagtccattttaaaacataattttaaaactgcaaactacccaagaaattattactttctacgtcacgtattttgtactaatatctttgtgtttacagtcaaattaattctaattatctctctaacagccttgtatcgtatatgcaaatatgaaggaatcatgggaaataggccctcttcctgcccgaccttggtaccgaattcagatctgaggaacccctagtgatggagttggccactccctctctgcgcgctcgctcgctcactgaggccgcccgggcaaagcccgggcgtcgggcgacctttggtcgcccggcctcagtgagcgagcgagcgcgcagagagggagtggccaa

SEQ ID NO: 450 - DNA, 4853 bp, synthetic construct
  misc_feature 1..4853: note = Exemplary recombinant AAV genome containing NRL promoter (3'->5' lower strand)
  misc_difference 4008..4033: note = a, c, g, or t
  misc_difference 4400..4425: note = a, c, g, or t
  source 1..4853: mol_type = other DNA
ttggccactccctctctgcgcgctcgctcgctcactgaggccgggcgaccaaaggtcgcccgacgcccgggctttgcccgggcggcctcagtgagcgagcgagcgcgcagagagggagtggccaactccatcactaggggttcctagatctctccccagcatgcatttaaatctagagttaacgccttttgctggccttttgctcacatgttctttcctgcgaagcttggacgcgcctgatcaaaaaaccaacacacgcttccaatgaaaataaacgatcctttattgctacttgtcatcgtcatccttgtaatcgatgtcatgatctttataatcaccgtcatggtctttgtagtcgctcgagactttcctcttcttcttgggggatccgccctttttgataatctgagggtgctttttgctcttcacctcatacaggtttcccagaatgtcggttgagtactttttgatactctgagtcttagaggcaattgttttgataattcgaggggggcgcttatcattcatgttttccagatactctcggtaagtgatgtcaatcatattcacttcaatgcggttcagcagatcattgttcaccccgatgaccctatacagttcgccattgatcttaatcaggtcgttgttgtaaaaggaggcgatgaactctgcctggttgctaatctttttcagctttttagcctcttcgtagcacttgctattcacttcatagtagttctcctttttgatgacatccagattcttgacagtcacaaatttatacacgccgttgtccagatagacatcgaatctgtatggcttcagtgacagcttgaccaccttgttgcgactgttagggtaatcgtctgtgatgtccagatgggcattcagcttgttcccatagtacttgatcttcttgatcacggggccattatcctttttgctatacttggtcaggtagttcccagtctcttcatagtacttatacagtgggttcttctcgtcgccgtactgctccataatcagcttcagtttctgatatgtctgaggatcatggtggtacatcagcagcttctcgggacttttgttgatcagctttttcagcttgtcattatctttgtcgtacagtccgttcagattgttcacaatcagggtattccccttatcgtcttttcttgtactatacagggtgtcattgatcagctctctgttgggctttttatccacccggtgagagtacttgtagtccttgaaatccttgatatgcttgatctggtgaggagtgatgaaaatctccttgtactcctgttctgtctcgatttcgggcatagattcggcctgcttctcttcgaacatctggttctccatcactttcttggctttgtccagctttttccactccttaaagatgaagtcggcatttgcgataatcagagcatcttcggcatggtgcttgtaccctttgttgcgctcctttttaaacttccatttgcgcctcagaaaagatgtgaacccgccgttgatggacttgactttcacatccagattgttcacccggaaataggatcgcagcagattcatcaggccgcgagtagcgtatcttgtgtccaccagattccggttaataaaatccttctggacggagaatctgttgatgtcccgctcttccagcaggtactcctttttggtcttgctgatgcggccctttcctttggccagattcagaatgtgctttttaaaggtttcgtaagagatcttggaatctgaactagacaggtactggaaaggagtcctattgccctttttagagttctcttcctgcttgaccagcaccttgttgttaaaggaattgtcgaaggacacgcttctggggataatatgatcgacctcgtagttgaatggattgttcagcaggtcctccagggggatggcctccagagaatacagacactttccctcctgcatatcgtgcagcttgattttttcaatcaggtactttgcgttctctttcccggtagttcggataatctcttcaatgcgttcattggtctgccggtttcgtttctgcatctcattgatcatcttctgtgcgtccttgctgttcttctccctagccagctcgataatgatatcattgggcaggccgtacttcttgatgatggcgttgatcactttgatgctctggatgaagctccgcttgaccacgggtgacagaatgaaatcgtccaccagtgtggttgggatctctttctgctgactcaggtccaccttttttgggaccagcttcagccggttaaagattgcaatctgattgtcgtttgtatgccacagctcatccagaatcagattgatagctttcagggacaggttgtgtgttccggtgtaccccttcagattactaatctgttcgatctcttcctgggtcagctcgctgttcaggttagtcagctcttcctggatgtcctcggagctctggtagatagtcaggatcttagcaatctgatccagcagttcggcgttctcaatgatttctttccgtgctgtgatgtccttaatatcgtgatacactttcagattggtgaactctggttttccagtgcttgtcacccggtagcccttgatgtcctcttcgttgaccaggatctccttagcaatctgtttcagtgtaggctttttcttctgcttaaacacgttttcgatgatctggaacttctcatagtattccagtttctcgttttcatccctggtgatgaccaggttgttcaggtcattcagggcgttgtacagatctgcgttataagcgtacttgacgcttctcagctcttctggaaaataggtgcaatgtcccatcagcatctcgtaccattccttgatgtctttccatccgaaggggctcccttctcctggtccctcatagtaggttctccgagtctccagcaggtcgatataagtatcgatgaagctctgatccagctggtggtaagccttctgcactttcagcagctgcttggcttctttgacgtagtcgcttgtcttgaacctattaattgaccctctcacctcgccatctttcttcagccgttccagctgcagctctgcgacatacttctcttccagagctttgctattgcgtgagatctgttcctttgtagacagctcgttgccggtgtcctcttccacctcattgacgttatgcactcctcggcgcttagccaggtgcagcagagctgcggaaaactcttcctctgacagcttctgactcaggcctttcaccctggcttcataaggattaattccactcagctcagaatggtcggtcagcaggttgtaatcgaacagcagtttcttcaccctctggattctgtgccttctccgtcgtttcaggcgcctggctcccctcttgcttctccgtccctcattgttttccacgttggcctccttgaacagtctgacgcctgcgtcgatcacgtcccttgtttcatagtcaataatcccataccccacgcttgtaatcccgatgtccagccccagaatgtagttccttttcatggacgcttcgaccttgcgctttttcttcggcatggtggcggctctccctatagtgagtcgtattagcggccgctgagtgaggaagagtgggcagcggctggggagtcgctgggtgggtgggacgtgcgtggtcccctggccgcaggctgggctcaaggctggtgtgagctgaagaccgagatgctggtggcttaggaggatttgcgaccagttcttcgcaatccttgaagggaggaggggcccaggagctttgtggagggcgggagcggtgggggggggtgctcccagaaccctagtgagattaaaatactagtcaataatcaatgtcaacgcgtatatctggcccgtacatcgcgacttaagcgctagcggtaccaaaaaatctcgccaacaagttgacgagataaacacggcattttgccttgttttagtagattctgtttccagagtactaaaacnnnnnnnnnnnnnnnnnnnnnnnnnnggtgtttcgtcctttccacaagatatataaagccaagaaatcgaaatactttcaagttacggtaagcatatgatagtccattttaaaacataattttaaaactgcaaactacccaagaaattattactttctacgtcacgtattttgtactaatatctttgtgtttacagtcaaattaattctaattatctctctaacagccttgtatcgtatatgcaaatatgaaggaatcatgggaaataggccctcttcctgcccgaccttccttcgatcgaactaagtcgaaaaaatctcgccaacaagttgacgagataaacacggcattttgccttgttttagtagattctgtttccagagtactaaaacnnnnnnnnnnnnnnnnnnnnnnnnnnggtgtttcgtcctttccacaagatatataaagccaagaaatcgaaatactttcaagttacggtaagcatatgatagtccattttaaaacataattttaaaactgcaaactacccaagaaattattactttctacgtcacgtattttgtactaatatctttgtgtttacagtcaaattaattctaattatctctctaacagccttgtatcgtatatgcaaatatgaaggaatcatgggaaataggccctcttcctgcccgaccttggtaccgaattcagatctgaggaacccctagtgatggagttggccactccctctctgcgcgctcgctcgctcactgaggccgcccgggcaaagcccgggcgtcgggcgacctttggtcgcccggcctcagtgagcgagcgagcgcgcagagagggagtggccaa

SEQ ID NO: 451 - protein, 8 aa, synthetic construct
  VAR_SEQ 1..8: note = Flag tag (single)
DYKDDDDK

SEQ ID NO: 452 - protein, 9 aa, synthetic construct
  VAR_SEQ 1..9: note = HA tag
YPYDVPDYA

SEQ ID NO: 453 - protein, 10 aa, synthetic construct
  VAR_SEQ 1..10: note = Myc tag
EQKLISEEDL

SEQ ID NO: 454 - protein, 6 aa, synthetic construct
  VAR_SEQ 1..6: note = His tag
HHHHHH

SEQ ID NO: 455 - DNA, 228 bp, synthetic construct
  misc_feature 1..228: note = bGH polyA
  source 1..228: mol_type = other DNA
gctgcaggatgaccggtcatcatcaccatcaccattgagtttaaacccgctgatcagcctcgactgtgccttctagttgccagccatctgttgtttgcccctcccccgtgccttccttgaccctggaaggtgccactcccactgtcctttcctaataaaatgaggaaattgcatcgcattgtctgagtaggtgtcattctattctggggggtggggtggggcaggaca

SEQ ID NO: 456 - DNA, 134 bp, synthetic construct
  misc_feature 1..134: note = SV40 polyA
  source 1..134: mol_type = other DNA
atgctttatttgtgaaatttgtgatgctattgctttatttgtaaccattataagctgcaataaacaagttaacaacaacaattgcattcattttatgtttcaggttcagggggaggtgtgggaggttttttaaa

SEQ ID NO: 457 - RNA, 17 nt, synthetic construct
  misc_feature 1..17: note = CEP290-B8/-89 targeting domain (RNA)
  source 1..17: mol_type = other RNA
gctaccggttacctgaa

SEQ ID NO: 458 - RNA, 17 nt, synthetic construct
  misc_feature 1..17: note = CEP290-B217/-B1074/-86 targeting domain (RNA)
  source 1..17: mol_type = other RNA
gcagaactagtgtagac

SEQ ID NO: 459 - RNA, 17 nt, synthetic construct
  misc_feature 1..17: note = CEP290-B69/-114 targeting domain (RNA)
  source 1..17: mol_type = other RNA
gttgagtatctcctgtt

SEQ ID NO: 460 - RNA, 20 nt, synthetic construct
  misc_feature 1..20: note = CEP290-496/-B115/-B1041/-85 targeting domain (RNA)
  source 1..20: mol_type = other RNA
gatgcagaactagtgtagac

SEQ ID NO: 461 - RNA, 20 nt, synthetic construct
  misc_feature 1..20: note = CEP290-B187/-B1045/-91/-1505 targeting domain (RNA)
  source 1..20: mol_type = other RNA
gcttgaactctgtgccaaac

SEQ ID NO: 462 - RNA, 20 nt, synthetic construct
  misc_feature 1..20: note = CEP290-B473/-B1035/-67/-956 targeting domain (RNA)
  source 1..20: mol_type = other RNA
gaaagatgaaaaatactctt

SEQ ID NO: 463 - RNA, 17 nt, synthetic construct
  misc_feature 1..17: note = CEP290-68 targeting domain (RNA)
  source 1..17: mol_type = other RNA
gaaatagatgtagattg

SEQ ID NO: 464 - RNA, 20 nt, synthetic construct
  misc_feature 1..20: note = CEP290-70 targeting domain (RNA)
  source 1..20: mol_type = other RNA
gaaatattaagggctcttcc

SEQ ID NO: 465 - RNA, 20 nt, synthetic construct
  misc_feature 1..20: note = CEP290-71/-969 targeting domain (RNA)
  source 1..20: mol_type = other RNA
gaacaaaagccagggaccat

SEQ ID NO: 466 - RNA, 20 nt, synthetic construct
  misc_feature 1..20: note = CEP290-B459/-72 targeting domain
  source 1..20: mol_type = other RNA
gaactctataccttttactg

SEQ ID NO: 467 - RNA, 20 nt, synthetic construct
  misc_feature 1..20: note = CEP290-73/-1554 targeting domain (RNA)
  source 1..20: mol_type = other RNA
gaagaatggaatagataata

SEQ ID NO: 468 - RNA, 20 nt, synthetic construct
  misc_feature 1..20: note = CEP290-74/-490 targeting domain (RNA)
  source 1..20: mol_type = other RNA
gaatagtttgttctgggtac

SEQ ID NO: 469 - RNA, 17 nt, synthetic construct
  misc_feature 1..17: note = CEP290-75 targeting domain (RNA)
  source 1..17: mol_type = other RNA
gaatggaatagataata

SEQ ID NO: 470 - RNA, 20 nt, synthetic construct
  misc_feature 1..20: note = CEP290-76 targeting domain (RNA)
  source 1..20: mol_type = other RNA
gaatttacagagtgcatcca

SEQ ID NO: 471 - RNA, 20 nt, synthetic construct
  misc_feature 1..20: note = CEP290-77 targeting domain (RNA)
  source 1..20: mol_type = other RNA
gagaaaaaggagcatgaaac

SEQ ID NO: 472 - RNA, 17 nt, synthetic construct
  misc_feature 1..17: note = CEP290-B283/-78 targeting domain (RNA)
  source 1..17: mol_type = other RNA
gagagccacagtgcatg

SEQ ID NO: 473 - RNA, 17 nt, synthetic construct
  misc_feature 1..17: note = CEP290-79 targeting domain (RNA)
  source 1..17: mol_type = other RNA
gaggtagaatcaagaag

SEQ ID NO: 474 - RNA, 17 nt, synthetic construct
  misc_feature 1..17: note = CEP290-80 targeting domain
  source 1..17: mol_type = other RNA
gagtgcatccatggtcc

SEQ ID NO: 475 - RNA, 17 nt, synthetic construct
  misc_feature 1..17: note = CEP290-81 targeting domain (RNA)
  source 1..17: mol_type = other RNA
gataactacaaagggtc

SEQ ID NO: 476 - RNA, 17 nt, synthetic construct
  misc_feature 1..17: note = CEP290-82/-B292 targeting domain (RNA)
  source 1..17: mol_type = other RNA
gatagagacaggaataa

SEQ ID NO: 477 - RNA, 17 nt, synthetic construct
  misc_feature 1..17: note = CEP290-B445/-B1069/-83 targeting domain (RNA)
  source 1..17: mol_type = other RNA
gatgaaaaatactcttt

SEQ ID NO: 478 - RNA, 17 nt, synthetic construct
  misc_feature 1..17: note = CEP290-B50/-B1070/-84 targeting domain (RNA)
  source 1..17: mol_type = other RNA
gatgacatgaggtaagt

SEQ ID NO: 479 - RNA, 17 nt, synthetic construct
  misc_feature 1..17: note = CEP290-B87/-87 targeting domain (RNA)
  source 1..17: mol_type = other RNA
gcatgtggtgtcaaata

SEQ ID NO: 480 - RNA, 20 nt, synthetic construct
  misc_feature 1..20: note = CEP290-B182/-B1044/-88/-500 targeting domain (RNA)
  source 1..20: mol_type = other RNA
gcctgaacaagttttgaaac

SEQ ID NO: 481 - RNA, 17 nt, synthetic construct
  misc_feature 1..17: note = CEP290-B85/-B1075/-90 targeting domain (RNA)
  source 1..17: mol_type = other RNA
gctcttttctatatata

SEQ ID NO: 482 - RNA, 20 nt, synthetic construct
  misc_feature 1..20: note = CEP290-B241/-B1048/-92/-1524 targeting domain (RNA)
  source 1..20: mol_type = other RNA
gcttttgacagtttttaagg

SEQ ID NO: 483 - RNA, 17 nt, synthetic construct
  misc_feature 1..17: note = CEP290-93 targeting domain (RNA)
  source 1..17: mol_type = other RNA
gcttttgttccttggaa

SEQ ID NO: 484 - RNA, 20 nt, synthetic construct
  misc_feature 1..20: note = CEP290-94/-1283 targeting domain (RNA)
  source 1..20: mol_type = other RNA
ggaacaaaagccagggacca

SEQ ID NO: 485 - RNA, 20 nt, synthetic construct
  misc_feature 1..20: note = CEP290-B278/-95 targeting domain (RNA)
  source 1..20: mol_type = other RNA
ggacttgacttttacccttc

SEQ ID NO: 486 - RNA, 17 nt, synthetic construct
  misc_feature 1..17: note = CEP290-96 targeting domain (RNA)
  source 1..17: mol_type = other RNA
ggagaatagtttgttct

SEQ ID NO: 487 - RNA, 20 nt, synthetic construct
  misc_feature 1..20: note = CEP290-B67/-97 targeting domain (RNA)
  source 1..20: mol_type = other RNA
ggagtcacatgggagtcaca

SEQ ID NO: 488 - RNA, 17 nt, synthetic construct
  misc_feature 1..17: note = CEP290-B444/-B1076/-98 targeting domain (RNA)
  source 1..17: mol_type = other RNA
ggataggacagaggaca

SEQ ID NO: 489 - RNA, 20 nt, synthetic construct
  misc_feature 1..20: note = CEP290-99 targeting domain (RNA)
  source 1..20: mol_type = other RNA
ggctgtaagataactacaaa

SEQ ID NO: 490 - RNA, 17 nt, synthetic construct
  misc_feature 1..17: note = CEP290-100 targeting domain (RNA)
  source 1..17: mol_type = other RNA
gggagaatagtttgttc

SEQ ID NO: 491 - RNA, 20 nt, synthetic construct
  misc_feature 1..20: note = CEP290-B227/-101 targeting domain (RNA)
  source 1..20: mol_type = other RNA
gggagtcacatgggagtcac

SEQ ID NO: 492 - RNA, 17 nt, synthetic construct
  misc_feature 1..17: note = CEP290-102 targeting domain (RNA)
  source 1..17: mol_type = other RNA
gggctcttcctggacca

SEQ ID NO: 493 - RNA, 20 nt, synthetic construct
  misc_feature 1..20: note = CEP290-103 targeting domain (RNA)
  source 1..20: mol_type = other RNA
gggtacaggggtaagagaaa

SEQ ID NO: 494 - RNA, 20 nt, synthetic construct
  misc_feature 1..20: note = CEP290-104/-489 targeting domain (RNA)
  source 1..20: mol_type = other RNA
ggtccctggcttttgttcct

SEQ ID NO: 495 - RNA, 20 nt, synthetic construct
  misc_feature 1..20: note = CEP290-105 targeting domain (RNA)
  source 1..20: mol_type = other RNA
gtaaaggttcatgagactag

SEQ ID NO: 496 - RNA, 20 nt, synthetic construct
  misc_feature 1..20: note = CEP290-B465/-B528/-106 targeting domain (RNA)
  source 1..20: mol_type = other RNA
gtaacataatcacctctctt

SEQ ID NO: 497 - RNA, 20 nt, synthetic construct
  misc_feature 1..20: note = CEP290-B216/-B1054/-107/-503 targeting domain (RNA)
  source 1..20: mol_type = other RNA
gtaagactggagatagagac

SEQ ID NO: 498 - RNA, 17 nt, synthetic construct
  misc_feature 1..17: note = CEP290-108 targeting domain (RNA)
  source 1..17: mol_type = other RNA
gtacaggggtaagagaa

SEQ ID NO: 499 - RNA, 20 nt, synthetic construct
  misc_feature 1..20: note = CEP290-B259/-109 targeting domain (RNA)
  source 1..20: mol_type = other RNA
gtagcttttgacagttttta

SEQ ID NO: 500 - RNA, 17 nt, synthetic construct
  misc_feature 1..17: note = CEP290-B260/-110 targeting domain (RNA)
  source 1..17: mol_type = other RNA
gtcacatgggagtcaca

SEQ ID NO: 501 - RNA, 20 nt, synthetic construct
  misc_feature 1..20: note = CEP290-B261/-111 targeting domain (RNA)
  source 1..20: mol_type = other RNA
gtggagagccacagtgcatg

SEQ ID NO: 502 - RNA, 17 nt, synthetic construct
  misc_feature 1..17: note = CEP290-112 targeting domain (RNA)
  source 1..17: mol_type = other RNA
gttacaatctgtgaata

SEQ ID NO: 503 - RNA, 17 nt, synthetic construct
  misc_feature 1..17: note = CEP290-B436/-113 targeting domain (RNA)
  source 1..17: mol_type = other RNA
gttctgtcctcagtaaa

SEQ ID NO: 504 - RNA, 20 nt, synthetic construct
  misc_feature 1..20: note = CEP290-B161/-115 targeting domain (RNA)
  source 1..20: mol_type = other RNA
gtttagaatgatcattcttg

SEQ ID NO: 505 - RNA, 17 nt, synthetic construct
  misc_feature 1..17: note = CEP290-116 targeting domain (RNA)
  source 1..17: mol_type = other RNA
gtttgttctgggtacag

SEQ ID NO: 506 - RNA, 20 nt, synthetic construct
  misc_feature 1..20: note = CEP290-B2/-117 targeting domain (RNA)
  source 1..20: mol_type = other RNA
taaaaactgtcaaaagctac

SEQ ID NO: 507 - RNA, 20 nt, synthetic construct
  misc_feature 1..20: note = CEP290-118 targeting domain (RNA)
  source 1..20: mol_type = other RNA
taaaaggtatagagttcaag

SEQ ID NO: 508 - RNA, 20 nt, synthetic construct
  misc_feature 1..20: note = CEP290-119/-987 targeting domain (RNA)
  source 1..20: mol_type = other RNA
taaatcatgcaagtgaccta

SEQ ID NO: 509 - RNA, 20 nt, synthetic construct
  misc_feature 1..20: note = CEP290-120 targeting domain (RNA)
  source 1..20: mol_type = other RNA
taagataactacaaagggtc

SEQ ID NO: 510 - RNA, 17 nt, synthetic construct
  misc_feature 1..17: note = CEP290-B1008/-B1059 targeting domain (RNA)
  source 1..17: mol_type = other RNA
gaatcctgaaagctact

SEQ ID NO: 511 - RNA, 24 nt, synthetic construct
  misc_feature 1..24: note = CEP290-284 targeting domain (RNA)
  source 1..24: mol_type = other RNA
gctaaatcatgcaagtgacctaag

SEQ ID NO: 512 - RNA, 19 nt, synthetic construct
  misc_feature 1..19: note = CEP290-487 targeting domain (RNA)
  source 1..19: mol_type = other RNA
ggtcacttgcatgatttag

SEQ ID NO: 513 - RNA, 18 nt, synthetic construct
  misc_feature 1..18: note = CEP290-486 targeting domain (RNA)
  source 1..18: mol_type = other RNA
gtcacttgcatgatttag

SEQ ID NO: 514 - RNA, 23 nt, synthetic construct
  misc_feature 1..23: note = CEP290-285 targeting domain (RNA)
  source 1..23: mol_type = other RNA
gcctaggactttctaatgctgga

SEQ ID NO: 515 - RNA, 18 nt, synthetic construct
  misc_feature 1..18: note = CEP290-479 targeting domain (RNA)
  source 1..18: mol_type = other RNA
ggactttctaatgctgga

SEQ ID NO: 516 - RNA, 24 nt, synthetic construct
  misc_feature 1..24: note = CEP290-286 targeting domain (RNA)
  source 1..24: mol_type = other RNA
gggaccatgggagaatagtttgtt

SEQ ID NO: 517 - RNA, 23 nt, synthetic construct
  misc_feature 1..23: note = CEP290-287 targeting domain (RNA)
  source 1..23: mol_type = other RNA
ggaccatgggagaatagtttgtt

SEQ ID NO: 518 - RNA, 22 nt, synthetic construct
  misc_feature 1..22: note = CEP290-288 targeting domain (RNA)
  source 1..22: mol_type = other RNA
gaccatgggagaatagtttgtt

SEQ ID NO: 519 - RNA, 24 nt, synthetic construct
  misc_feature 1..24: note = CEP290-289 targeting domain (RNA)
  source 1..24: mol_type = other RNA
ggtccctggcttttgttccttgga

SEQ ID NO: 520 - RNA, 23 nt, synthetic construct
  misc_feature 1..23: note = CEP290-290 targeting domain (RNA)
  source 1..23: mol_type = other RNA
gtccctggcttttgttccttgga

SEQ ID NO: 521 - RNA, 24 nt, synthetic construct
  misc_feature 1..24: note = CEP290-374 targeting domain (RNA)
  source 1..24: mol_type = other RNA
gaaaacgttgttctgagtagcttt

SEQ ID NO: 522 - RNA, 18 nt, synthetic construct
  misc_feature 1..18: note = CEP290-478 targeting domain (RNA)
  source 1..18: mol_type = other RNA
gttgttctgagtagcttt

SEQ ID NO: 523 - RNA, 19 nt, synthetic construct
  misc_feature 1..19: note = CEP290-488 targeting domain (RNA)
  source 1..19: mol_type = other RNA
gtccctggcttttgttcct

SEQ ID NO: 524 - RNA, 23 nt, synthetic construct
  misc_feature 1..23: note = CEP290-291 targeting domain (RNA)
  source 1..23: mol_type = other RNA
gacatcttgtggataatgtatca

SEQ ID NO: 525 - RNA, 21 nt, synthetic construct
  misc_feature 1..21: note = CEP290-292 targeting domain (RNA)
  source 1..21: mol_type = other RNA
gtcctaggcaagagacatctt

SEQ ID NO: 526 - RNA, 23 nt, synthetic construct
  misc_feature 1..23: note = CEP290-293 targeting domain (RNA)
  source 1..23: mol_type = other RNA
gccagcaaaagcttttgagctaa

SEQ ID NO: 527 - RNA, 19 nt, synthetic construct
  misc_feature 1..19: note = CEP290-481 targeting domain (RNA)
  source 1..19: mol_type = other RNA
gcaaaagcttttgagctaa

SEQ ID NO: 528 - RNA, 21 nt, synthetic construct
  misc_feature 1..21: note = CEP290-294 targeting domain (RNA)
  source 1..21: mol_type = other RNA
gatcttattctactcctgtga

SEQ ID NO: 529 - RNA, 23 nt, synthetic construct
  misc_feature 1..23: note = CEP290-295 targeting domain (RNA)
  source 1..23: mol_type = other RNA
gctttcaggattcctactaaatt

SEQ ID NO: 530 - RNA, 22 nt, synthetic construct
  misc_feature 1..22: note = CEP290-323 targeting domain (RNA)
  source 1..22: mol_type = other RNA
gttctgtcctcagtaaaaggta

SEQ ID NO: 531 - RNA, 18 nt, synthetic construct
  misc_feature 1..18: note = CEP290-480 targeting domain (RNA)
  source 1..18: mol_type = other RNA
gaacaacgttttcattta

SEQ ID NO: 532 - RNA, 24 nt, synthetic construct
  misc_feature 1..24: note = CEP290-296 targeting domain (RNA)
  source 1..24: mol_type = other RNA
gtagaatatcataagttacaatct

SEQ ID NO: 533 - RNA, 21 nt, synthetic construct
  misc_feature 1..21: note = CEP290-297 targeting domain (RNA)
  source 1..21: mol_type = other RNA
gaatatcataagttacaatct

SEQ ID NO: 534 - RNA, 20 nt, synthetic construct
  misc_feature 1..20: note = CEP290-298 targeting domain (RNA)
  source 1..20: mol_type = other RNA
gtggctgtaagataactaca

SEQ ID NO: 535 - RNA, 18 nt, synthetic construct
  misc_feature 1..18: note = CEP290-299 targeting domain (RNA)
  source 1..18: mol_type = other RNA
ggctgtaagataactaca

SEQ ID NO: 536 - RNA, 22 nt, synthetic construct
  misc_feature 1..22: note = CEP290-300 targeting domain (RNA)
  source 1..22: mol_type = other RNA
gtttaacgttatcattttccca

SEQ ID NO: 537 - RNA, 24 nt, synthetic construct
  misc_feature 1..24: note = CEP290-301 targeting domain (RNA)
  source 1..24: mol_type = other RNA
gtaagagaaagggatgggcactta

SEQ ID NO: 538 - RNA, 20 nt, synthetic construct
  misc_feature 1..20: note = CEP290-492 targeting domain (RNA)
  source 1..20: mol_type = other RNA
gagaaagggatgggcactta

SEQ ID NO: 539 - RNA, 18 nt, synthetic construct
  misc_feature 1..18: note = CEP290-491 targeting domain (RNA)
  source 1..18: mol_type = other RNA
gaaagggatgggcactta

SEQ ID NO: 540 - RNA, 18 nt, synthetic construct
  misc_feature 1..18: note = CEP290-483 targeting domain (RNA)
  source 1..18: mol_type = other RNA
gtaaatgaaaacgttgtt

SEQ ID NO: 541 - RNA, 24 nt, synthetic construct
  misc_feature 1..24: note = CEP290-302 targeting domain (RNA)
  source 1..24: mol_type = other RNA
gataaacatgactcataatttagt

SEQ ID NO: 542 - RNA, 23 nt, synthetic construct
  misc_feature 1..23: note = CEP290-303 targeting domain (RNA)
  source 1..23: mol_type = other RNA
ggaacaaaagccagggaccatgg

SEQ ID NO: 543 - RNA, 22 nt, synthetic construct
  misc_feature 1..22: note = CEP290-304 targeting domain (RNA)
  source 1..22: mol_type = other RNA
gaacaaaagccagggaccatgg

SEQ ID NO: 544 - RNA, 24 nt, synthetic construct
  misc_feature 1..24: note = CEP290-305 targeting domain (RNA)
  source 1..24: mol_type = other RNA
gggagaatagtttgttctgggtac

SEQ ID NO: 545 - RNA, 23 nt, synthetic construct
  misc_feature 1..23: note = CEP290-306 targeting domain (RNA)
  source 1..23: mol_type = other RNA
ggagaatagtttgttctgggtac

SEQ ID NO: 546 - RNA, 22 nt, synthetic construct
  misc_feature 1..22: note = CEP290-307 targeting domain (RNA)
  source 1..22: mol_type = other RNA
gagaatagtttgttctgggtac

SEQ ID NO: 547 - RNA, 20 nt, synthetic construct
  misc_feature 1..20: note = CEP290-B1036/-482 targeting domain (RNA)
  source 1..20: mol_type = other RNA
gaaatagaggcttatggatt

SEQ ID NO: 548 - RNA, 24 nt, synthetic construct
  misc_feature 1..24: note = CEP290-308 targeting domain (RNA)
  source 1..24: mol_type = other RNA
gttctgggtacaggggtaagagaa

SEQ ID NO: 549 - RNA, 19 nt, synthetic construct
  misc_feature 1..19: note = CEP290-494 targeting domain (RNA)
  source 1..19: mol_type = other RNA
gggtacaggggtaagagaa

SEQ ID NO: 550 - RNA, 18 nt, synthetic construct
  misc_feature 1..18: note = CEP290-493 targeting domain (RNA)
  source 1..18: mol_type = other RNA
ggtacaggggtaagagaa

SEQ ID NO: 551 - RNA, 24 nt, synthetic construct
  misc_feature 1..24: note = CEP290-309 targeting domain (RNA)
  source 1..24: mol_type = other RNA
gtaaattctcatcattttttattg

SEQ ID NO: 552 - RNA, 24 nt, synthetic construct
  misc_feature 1..24: note = CEP290-310 targeting domain (RNA)
  source 1..24: mol_type = other RNA
ggagaggataggacagaggacatg

SEQ ID NO: 553 - RNA, 23 nt, synthetic construct
  misc_feature 1..23: note = CEP290-311 targeting domain (RNA)
  source 1..23: mol_type = other RNA
gagaggataggacagaggacatg

SEQ ID NO: 554 - RNA, 21 nt, synthetic construct
  misc_feature 1..21: note = CEP290-313 targeting domain (RNA)
  source 1..21: mol_type = other RNA
gaggataggacagaggacatg

SEQ ID NO: 555 - RNA, 19 nt, synthetic construct
  misc_feature 1..19: note = CEP290-485 targeting domain (RNA)
  source 1..19: mol_type = other RNA
ggataggacagaggacatg

SEQ ID NO: 556 - RNA, 18 nt, synthetic construct
  misc_feature 1..18: note = CEP290-484 targeting domain (RNA)
  source 1..18: mol_type = other RNA
gataggacagaggacatg

SEQ ID NO: 557 - RNA, 22 nt, synthetic construct
  misc_feature 1..22: note = CEP290-314 targeting domain (RNA)
  source 1..22: mol_type = other RNA
gaataaatgtagaattttaatg

SEQ ID NO: 558 - RNA, 22 nt, synthetic construct
  misc_feature 1..22: note = CEP290-64 targeting domain (RNA)
  source 1..22: mol_type = other RNA
gtcaaaagctaccggttacctg

SEQ ID NO: 559 - RNA, 23 nt, synthetic construct
  misc_feature 1..23: note = CEP290-315 targeting domain (RNA)
  source 1..23: mol_type = other RNA
gtttttaaggcggggagtcacat

SEQ ID NO: 560 - RNA, 24 nt, synthetic construct
  misc_feature 1..24: note = CEP290-203 targeting domain (RNA)
  source 1..24: mol_type = other RNA
gtcttacatcctccttactgccac

SEQ ID NO: 561 - RNA, 24 nt, synthetic construct
  misc_feature 1..24: note = CEP290-316 targeting domain (RNA)
  source 1..24: mol_type = other RNA
gagtcacagggtaggattcatgtt

SEQ ID NO: 562 - RNA, 22 nt, synthetic construct
  misc_feature 1..22: note = CEP290-317 targeting domain (RNA)
  source 1..22: mol_type = other RNA
gtcacagggtaggattcatgtt

SEQ ID NO: 563 - RNA, 24 nt, synthetic construct
  misc_feature 1..24: note = CEP290-318 targeting domain (RNA)
  source 1..24: mol_type = other RNA
ggcacagagttcaagctaatacat

SEQ ID NO: 564 - RNA, 23 nt, synthetic construct
  misc_feature 1..23: note = CEP290-319 targeting domain (RNA)
  source 1..23: mol_type = other RNA
gcacagagttcaagctaatacat

SEQ ID NO: 565 - RNA, 18 nt, synthetic construct
  misc_feature 1..18: note = CEP290-505 targeting domain (RNA)
  source 1..18: mol_type = other RNA
gagttcaagctaatacat

SEQ ID NO: 566 - RNA, 24 nt, synthetic construct
  misc_feature 1..24: note = CEP290-320 targeting domain (RNA)
  source 1..24: mol_type = other RNA
gtgttgagtatctcctgtttggca

SEQ ID NO: 567 - RNA, 22 nt, synthetic construct
  misc_feature 1..22: note = CEP290-321 targeting domain (RNA)
  source 1..22: mol_type = other RNA
gttgagtatctcctgtttggca

SEQ ID NO: 568 - RNA, 19 nt, synthetic construct
  misc_feature 1..19: note = CEP290-504 targeting domain (RNA)
  source 1..19: mol_type = other RNA
gagtatctcctgtttggca

SEQ ID NO: 569 - RNA, 21 nt, synthetic construct
  misc_feature 1..21: note = CEP290-322 targeting domain (RNA)
  source 1..21: mol_type = other RNA
gaaaatcagatttcatgtgtg

SEQ ID NO: 570 - RNA, 24 nt, synthetic construct
  misc_feature 1..24: note = CEP290-324 targeting domain (RNA)
  source 1..24: mol_type = other RNA
gccacaagaatgatcattctaaac

SEQ ID NO: 571 - RNA, 23 nt, synthetic construct
  misc_feature 1..23: note = CEP290-325 targeting domain (RNA)
  source 1..23: mol_type = other RNA
ggcggggagtcacatgggagtca

SEQ ID NO: 572 - RNA, 22 nt, synthetic construct
  misc_feature 1..22: note = CEP290-326 targeting domain (RNA)
  source 1..22: mol_type = other RNA
gcggggagtcacatgggagtca

SEQ ID NO: 573 - RNA, 20 nt, synthetic construct
  misc_feature 1..20: note = CEP290-B1051/-499 targeting domain (RNA)
  source 1..20: mol_type = other RNA
ggggagtcacatgggagtca

SEQ ID NO: 574 - RNA, 19 nt, synthetic construct
  misc_feature 1..19: note = CEP290-498 targeting domain (RNA)
  source 1..19: mol_type = other RNA
gggagtcacatgggagtca

SEQ ID NO: 575 - RNA, 18 nt, synthetic construct
  misc_feature 1..18: note = CEP290-497 targeting domain (RNA)
  source 1..18: mol_type = other RNA
ggagtcacatgggagtca

SEQ ID NO: 576 - RNA, 22 nt, synthetic construct
  misc_feature 1..22: note = CEP290-327 targeting domain (RNA)
  source 1..22: mol_type = other RNA
gcttttgacagtttttaaggcg

SEQ ID NO: 577 - RNA, 21 nt, synthetic construct
  misc_feature 1..21: note = CEP290-328 targeting domain (RNA)
  source 1..21: mol_type = other RNA
gatcattcttgtggcagtaag

SEQ ID NO: 578 - RNA, 18 nt, synthetic construct
  misc_feature 1..18: note = CEP290-329 targeting domain (RNA)
  source 1..18: mol_type = other RNA
gagcaagagatgaactag

SEQ ID NO: 579 - RNA, 23 nt, synthetic construct
  misc_feature 1..23: note = CEP290-330 targeting domain (RNA)
  source 1..23: mol_type = other RNA
gtagattgaggtagaatcaagaa

SEQ ID NO: 580 - RNA, 20 nt, synthetic construct
  misc_feature 1..20: note = CEP290-506 targeting domain (RNA)
  source 1..20: mol_type = other RNA
gattgaggtagaatcaagaa

SEQ ID NO: 581 - RNA, 24 nt, synthetic construct
  misc_feature 1..24: note = CEP290-331 targeting domain (RNA)
  source 1..24: mol_type = other RNA
ggatgtaagactggagatagagac

SEQ ID NO: 582 - RNA, 23 nt, synthetic construct
  misc_feature 1..23: note = CEP290-332 targeting domain (RNA)
  source 1..23: mol_type = other RNA
gatgtaagactggagatagagac

SEQ ID NO: 583 - RNA, 24 nt, synthetic construct
  misc_feature 1..24: note = CEP290-333 targeting domain (RNA)
  source 1..24: mol_type = other RNA
gggagtcacatgggagtcacaggg

SEQ ID NO: 584 - RNA, 23 nt, synthetic construct
  misc_feature 1..23: note = CEP290-334 targeting domain (RNA)
  source 1..23: mol_type = other RNA
ggagtcacatgggagtcacaggg

SEQ ID NO: 585 - RNA, 22 nt, synthetic construct
  misc_feature 1..22: note = CEP290-335 targeting domain (RNA)
  source 1..22: mol_type = other RNA
gagtcacatgggagtcacaggg

SEQ ID NO: 586 - RNA, 20 nt, synthetic construct
  misc_feature 1..20: note = CEP290-502/-B1055 targeting domain (RNA)
  source 1..20: mol_type = other RNA
gtcacatgggagtcacaggg

SEQ ID NO: 587 - RNA, 23 nt, synthetic construct
  misc_feature 1..23: note = CEP290-336 targeting domain (RNA)
  source 1..23: mol_type = other RNA
gtttacatatctgtcttccttaa

SEQ ID NO: 588 - RNA, 18 nt, synthetic construct
  misc_feature 1..18: note = CEP290-507 targeting domain (RNA)
  source 1..18: mol_type = other RNA
gatttcatgtgtgaagaa

SEQ ID NO: 589 - RNA, 20 nt, synthetic construct
  misc_feature 1..20: note = CEP290-B65/-1936 targeting domain (RNA)
  source 1..20: mol_type = other RNA
gagttcaagctaatacatga

SEQ ID NO: 590 - RNA, 17 nt, synthetic construct
  misc_feature 1..17: note = CEP290-B296/-B536/-1934 targeting domain (RNA)
  source 1..17: mol_type = other RNA
gttgttctgagtagctt

SEQ ID NO: 591 - RNA, 20 nt, synthetic construct
  misc_feature 1..20: note = CEP290-B308/-B482/-1932 targeting domain (RNA)
  source 1..20: mol_type = other RNA
ggcaaaagcagcagaaagca

SEQ ID NO: 592 - RNA, 17 nt, synthetic construct
  misc_feature 1..17: note = CEP290-1933 targeting domain (RNA)
  source 1..17: mol_type = other RNA
gtggctgaatgacttct

SEQ ID NO: 593 - RNA, 17 nt, synthetic construct
  misc_feature 1..17: note = CEP290-1935 targeting domain (RNA)
  source 1..17: mol_type = other RNA
gactagaggtcacgaaa

SEQ ID NO: 594 - RNA, 17 nt, synthetic construct
  misc_feature 1..17: note = CEP290-B6/-B106/-220 targeting domain (RNA)
  source 1..17: mol_type = other RNA
ctcatacctatccctat

SEQ ID NO: 595 - RNA, 17 nt, synthetic construct
  misc_feature 1..17: note = CEP290-B20/-B55/-152 targeting domain (RNA)
  source 1..17: mol_type = other RNA
acactgccaatagggat

SEQ ID NO: 596 - RNA, 17 nt, synthetic construct
  misc_feature 1..17: note = CEP290-B10 targeting domain (RNA)
  source 1..17: mol_type = other RNA
caattacaactggggcc

SEQ ID NO: 597 - RNA, 17 nt, synthetic construct
  misc_feature 1..17: note = CEP290-B21/-B92/-216 targeting domain (RNA)
  source 1..17: mol_type = other RNA
ctaagacactgccaata

SEQ ID NO: 598 - RNA, 17 nt, synthetic construct
  misc_feature 1..17: note = CEP290-B9/-B1005 targeting domain (RNA)
  source 1..17: mol_type = other RNA
atactcacaattacaac

SEQ ID NO: 599 - RNA, 20 nt, synthetic construct
  misc_feature 1..20: note = CEP290-B1/-B138 targeting domain (RNA)
  source 1..20: mol_type = other RNA
tatctcatacctatccctat

SEQ ID NO: 600 - RNA, 20 nt, synthetic construct
  misc_feature 1..20: note = CEP290-B29/-B253/-140 targeting domain (RNA)
  source 1..20: mol_type = other RNA
aagacactgccaatagggat

SEQ ID NO: 601 - RNA, 20 nt, synthetic construct
  misc_feature 1..20: note = CEP290-B5 targeting domain (RNA)
  source 1..20: mol_type = other RNA
tcacaattacaactggggcc

SEQ ID NO: 602 - RNA, 20 nt, synthetic construct
  misc_feature 1..20: note = CEP290-B30 targeting domain (RNA)
  source 1..20: mol_type = other RNA
agatactcacaattacaact

SEQ ID NO: 603 - RNA, 17 nt, synthetic construct
  misc_feature 1..17: note = CEP290-B22/-B44/-B1224/-253 targeting domain (RNA)
  source 1..17: mol_type = other RNA
actaagacactgccaat

SEQ ID NO: 604 - RNA, 17 nt, synthetic construct
  misc_feature 1..17: note = CEP290-B23 targeting domain (RNA)
  source 1..17: mol_type = other RNA
tactcacaattacaact

SEQ ID NO: 605 - RNA, 17 nt, synthetic construct
  misc_feature 1..17: note = CEP290-B24 targeting domain (RNA)
  source 1..17: mol_type = other RNA
actcacaattacaactg

SEQ ID NO: 606 - RNA, 17 nt, synthetic construct
  misc_feature 1..17: note = CEP290-B25 targeting domain (RNA)
  source 1..17: mol_type = other RNA
acaactggggccaggtg

SEQ ID NO: 607 - RNA, 17 nt, synthetic construct
  misc_feature 1..17: note = CEP290-B26 targeting domain (RNA)
  source 1..17: mol_type = other RNA
actggggccaggtgcgg

SEQ ID NO: 608 - RNA, 17 nt, synthetic construct
  misc_feature 1..17: note = CEP290-B27 targeting domain (RNA)
  source 1..17: mol_type = other RNA
atgtgagccaccgcacc

SEQ ID NO: 609 - RNA, 20 nt, synthetic construct
  misc_feature 1..20: note = CEP290-B31/-B151/-127 targeting domain (RNA)
  source 1..20: mol_type = other RNA
aaactaagacactgccaata

SEQ ID NO: 610 - RNA, 20 nt, synthetic construct
  misc_feature 1..20: note = CEP290-B32/-B196/-B1086/-38/-122/-619 targeting domain (RNA)
  source 1..20: mol_type = other RNA
aaaactaagacactgccaat

SEQ ID NO: 611 - RNA, 20 nt, synthetic construct
  misc_feature 1..20: note = CEP290-B33 targeting domain (RNA)
  source 1..20: mol_type = other RNA
attacaactggggccaggtg

SEQ ID NO: 612 - RNA, 20 nt, synthetic construct
  misc_feature 1..20: note = CEP290-B34 targeting domain (RNA)
  source 1..20: mol_type = other RNA
acaactggggccaggtgcgg

SEQ ID NO: 613 - RNA, 20 nt, synthetic construct
  misc_feature 1..20: note = CEP290-B1002/-B1131/-509 targeting domain (RNA)
  source 1..20: mol_type = other RNA
cactgccaatagggataggt

SEQ ID NO: 614 - RNA, 17 nt, synthetic construct
  misc_feature 1..17: note = CEP290-B1003/-B1299 targeting domain (RNA)
  source 1..17: mol_type = other RNA
tgccaatagggataggt

SEQ ID NO: 615 - RNA, 20 nt, synthetic construct
  misc_feature 1..20: note = CEP290-B1004 targeting domain (RNA)
  source 1..20: mol_type = other RNA
tgagatactcacaattacaa

SEQ ID NO: 616 - RNA, 20 nt, synthetic construct
  misc_feature 1..20: note = CEP290-B1006/-512 targeting domain (RNA)
  source 1..20: mol_type = other RNA
acctggccccagttgtaatt

SEQ ID NO: 617 - RNA, 17 nt, synthetic construct
  misc_feature 1..17: note = CEP290-B1007 targeting domain (RNA)
  source 1..17: mol_type = other RNA
tggccccagttgtaatt

SEQ ID NO: 618 - RNA, 17 nt, synthetic construct
  misc_feature 1..17: note = CEP290-B269/-166 targeting domain (RNA)
  source 1..17: mol_type = other RNA
agctaccggttacctga

SEQ ID NO: 619 - RNA, 20 nt, synthetic construct
  misc_feature 1..20: note = CEP290-B285/-B1017/-656 targeting domain (RNA)
  source 1..20: mol_type = other RNA
tttaaggcggggagtcacat

SEQ ID NO: 620 - RNA, 20 nt, synthetic construct
  misc_feature 1..20: note = CEP290-B3/-131 targeting domain (RNA)
  source 1..20: mol_type = other RNA
aaagctaccggttacctgaa

SEQ ID NO: 621 - RNA, 20 nt, synthetic construct
  misc_feature 1..20: note = CEP290-B207/-124 targeting domain (RNA)
  source 1..20: mol_type = other RNA
aaaagctaccggttacctga

SEQ ID NO: 622 - RNA, 20 nt, synthetic construct
  misc_feature 1..20: note = CEP290-B62/-B1101/-156/-1378 targeting domain (RNA)
  source 1..20: mol_type = other RNA
acgtgctcttttctatatat

SEQ ID NO: 623 - RNA, 20 nt, synthetic construct
  misc_feature 1..20: note = CEP290-B121/-197 targeting domain (RNA)
  source 1..20: mol_type = other RNA
atttgacaccacatgcactg

SEQ ID NO: 624 - RNA, 20 nt, synthetic construct
  misc_feature 1..20: note = CEP290-B120/-B1149/-214/-1711 targeting domain (RNA)
  source 1..20: mol_type = other RNA
cgtgctcttttctatatata

SEQ ID NO: 625 - RNA, 20 nt, synthetic construct
  misc_feature 1..20: note = CEP290-B36/-B1191/-1579 targeting domain (RNA)
  source 1..20: mol_type = other RNA
tggtgtcaaatatggtgctt

SEQ ID NO: 626 - RNA, 20 nt, synthetic construct
  misc_feature 1..20: note = CEP290-B236/-158 targeting domain (RNA)
  source 1..20: mol_type = other RNA
acttttacccttcaggtaac

SEQ ID NO: 627 - RNA, 20 nt, synthetic construct
  misc_feature 1..20: note = CEP290-B70/-176 targeting domain (RNA)
  source 1..20: mol_type = other RNA
agtgcatgtggtgtcaaata

SEQ ID NO: 628 - RNA, 20 nt, synthetic construct
  misc_feature 1..20: note = CEP290-B177/-B1166/-1584 targeting domain (RNA)
  source 1..20: mol_type = other RNA
tacatgagagtgattagtgg

SEQ ID NO: 629 - RNA, 20 nt, synthetic construct
  misc_feature 1..20: note = CEP290-B451/-B498/-215 targeting domain (RNA)
  source 1..20: mol_type = other RNA
cgttgttctgagtagctttc

SEQ ID NO: 630 - RNA, 20 nt, synthetic construct
  misc_feature 1..20: note = CEP290-B452/-212 targeting domain (RNA)
  source 1..20: mol_type = other RNA
ccacaagatgtctcttgcct

SEQ ID NO: 631 - RNA, 20 nt, synthetic construct
  misc_feature 1..20: note = CEP290-B453/-213 targeting domain (RNA)
  source 1..20: mol_type = other RNA
cctaggcaagagacatcttg

SEQ ID NO: 632 - RNA, 20 nt, synthetic construct
  misc_feature 1..20: note = CEP290-B454/-B1189/-1006 targeting domain (RNA)
  source 1..20: mol_type = other RNA
tgcctaggactttctaatgc

SEQ ID NO: 633 - RNA, 20 nt, synthetic construct
  misc_feature 1..20: note = CEP290-B523/-B456/-193 targeting domain (RNA)
  source 1..20: mol_type = other RNA
attagctcaaaagcttttgc

SEQ ID NO: 634 - RNA, 17 nt, synthetic construct
  misc_feature 1..17: note = CEP290-B78/-237 targeting domain (RNA)
  source 1..17: mol_type = other RNA
gcttttgacagttttta

SEQ ID NO: 635 - RNA, 20 nt, synthetic construct
  misc_feature 1..20: note = CEP290-B79/-238 targeting domain (RNA)
  source 1..20: mol_type = other RNA
ggagatagagacaggaataa

SEQ ID NO: 636 - RNA, 17 nt, synthetic construct
  misc_feature 1..17: note = CEP290-B233/-B1021/-248 targeting domain (RNA)
  source 1..17: mol_type = other RNA
aaggcggggagtcacat

SEQ ID NO: 637 - RNA, 17 nt, synthetic construct
  misc_feature 1..17: note = CEP290-B175/-B1023 targeting domain (RNA)
  source 1..17: mol_type = other RNA
taaggcggggagtcaca

SEQ ID NO: 638 - RNA, 17 nt, synthetic construct
  misc_feature 1..17: note = CEP290-B280/-B1295 targeting domain (RNA)
  source 1..17: mol_type = other RNA
tgaactctgtgccaaac

SEQ ID NO: 639 - RNA, 17 nt, synthetic construct
  misc_feature 1..17: note = CEP290-B268 targeting domain (RNA)
  source 1..17: mol_type = other RNA
tttacccttcaggtaac

SEQ ID NO: 640 - RNA, 17 nt, synthetic construct
  misc_feature 1..17: note = CEP290-B154 targeting domain (RNA)
  source 1..17: mol_type = other RNA
tgacaccacatgcactg

SEQ ID NO: 641 - RNA, 17 nt, synthetic construct
  misc_feature 1..17: note = CEP290-B231 targeting domain (RNA)
  source 1..17: mol_type = other RNA
ttgctctagatgacatg

SEQ ID NO: 642 - RNA, 17 nt, synthetic construct
  misc_feature 1..17: note = CEP290-B242/-B1296 targeting domain (RNA)
  source 1..17: mol_type = other RNA
tgacagtttttaaggcg

SEQ ID NO: 643 - RNA, 17 nt, synthetic construct
  misc_feature 1..17: note = CEP290-B226/-B1302 targeting domain (RNA)
  source 1..17: mol_type = other RNA
tgtcaaatatggtgctt

SEQ ID NO: 644 - RNA, 17 nt, synthetic construct
  misc_feature 1..17: note = CEP290-B159/-175 targeting domain (RNA)
  source 1..17: mol_type = other RNA
agtcacatgggagtcac

SEQ ID NO: 645 - RNA, 17 nt, synthetic construct
  misc_feature 1..17: note = CEP290-B222/-B1259/-190 targeting domain (RNA)
  source 1..17: mol_type = other RNA
atgagagtgattagtgg

SEQ ID NO: 646 - RNA, 17 nt, synthetic construct
  misc_feature 1..17: note = CEP290-B274 targeting domain (RNA)
  source 1..17: mol_type = other RNA
tgacatgaggtaagtag

SEQ ID NO: 647 - RNA, 17 nt, synthetic construct
  misc_feature 1..17: note = CEP290-B68 targeting domain (RNA)
  source 1..17: mol_type = other RNA
tacatgagagtgattag

SEQ ID NO: 648 - RNA, 17 nt, synthetic construct
  misc_feature 1..17: note = CEP290-B212/-B1282 targeting domain (RNA)
  source 1..17: mol_type = other RNA
taaggaggatgtaagac

SEQ ID NO: 649 - RNA, 17 nt, synthetic construct
  misc_feature 1..17: note = CEP290-B270/-233 targeting domain (RNA)
  source 1..17: mol_type = other RNA
cttgacttttacccttc

SEQ ID NO: 650 - RNA, 17 nt, synthetic construct
  misc_feature 1..17: note = CEP290-B96/-B1290 targeting domain (RNA)
  source 1..17: mol_type = other RNA
tcactgagcaaaacaac

SEQ ID NO: 651 - RNA, 17 nt, synthetic construct
  misc_feature 1..17: note = CEP290-B104/-B1227/-161 targeting domain (RNA)
  source 1..17: mol_type = other RNA
agacttatattccatta

SEQ ID NO: 652 - RNA, 17 nt, synthetic construct
  misc_feature 1..17: note = CEP290-B122/-210 targeting domain (RNA)
  source 1..17: mol_type = other RNA
catgggagtcacagggt

SEQ ID NO: 653 - RNA, 17 nt, synthetic construct
  misc_feature 1..17: note = CEP290-B229 targeting domain (RNA)
  source 1..17: mol_type = other RNA
tagaatgatcattcttg

SEQ ID NO: 654 - RNA, 17 nt, synthetic construct
  misc_feature 1..17: note = CEP290-B99/-B1314 targeting domain (RNA)
  source 1..17: mol_type = other RNA
ttgacagtttttaaggc

SEQ ID NO: 655 - RNA, 17 nt, synthetic construct
  misc_feature 1..17: note = CEP290-B7/-128 targeting domain (RNA)
  source 1..17: mol_type = other RNA
aaactgtcaaaagctac

SEQ ID NO: 656 - RNA, 17 nt, synthetic construct
  misc_feature 1..17: note = CEP290-B37/-B1256/-188 targeting domain (RNA)
  source 1..17: mol_type = other RNA
atgacatgaggtaagta

SEQ ID NO: 657 - RNA, 17 nt, synthetic construct
  misc_feature 1..17: note = CEP290-B97 targeting domain (RNA)
  source 1..17: mol_type = other RNA
tgtttcaaaacttgttc

SEQ ID NO: 658 - RNA, 17 nt, synthetic construct
  misc_feature 1..17: note = CEP290-B173/-B1250/-182 targeting domain (RNA)
  source 1..17: mol_type = other RNA
atatctgtcttccttaa

SEQ ID NO: 659 - RNA, 17 nt, synthetic construct
  misc_feature 1..17: note = CEP290-B136/-B1294/-276 targeting domain (RNA)
  source 1..17: mol_type = other RNA
tgaacaagttttgaaac

SEQ ID NO: 660 - RNA, 17 nt, synthetic construct
  misc_feature 1..17: note = CEP290-B71 targeting domain (RNA)
  source 1..17: mol_type = other RNA
ttctgcatcttatacat

SEQ ID NO: 661 - RNA, 17 nt, synthetic construct
  misc_feature 1..17: note = CEP290-B172/-B1244/-179 targeting domain (RNA)
  source 1..17: mol_type = other RNA
ataagtcttttgatata

SEQ ID NO: 662 - RNA, 17 nt, synthetic construct
  misc_feature 1..17: note = CEP290-B238/-B1318 targeting domain (RNA)
  source 1..17: mol_type = other RNA
tttgacagtttttaagg

SEQ ID NO: 663 - RNA, 17 nt, synthetic construct
  misc_feature 1..17: note = CEP290-B148/-B1300 targeting domain (RNA)
  source 1..17: mol_type = other RNA
tgctcttttctatatat

SEQ ID NO: 664 - RNA, 17 nt, synthetic construct
  misc_feature 1..17: note = CEP290-B208/-B1226/-255 targeting domain (RNA)
  source 1..17: mol_type = other RNA
agactggagatagagac

SEQ ID NO: 665 - RNA, 17 nt, synthetic construct
  misc_feature 1..17: note = CEP290-B53/-208 targeting domain (RNA)
  source 1..17: mol_type = other RNA
cataagaaagaacactg

SEQ ID NO: 666 - RNA, 17 nt, synthetic construct
  misc_feature 1..17: note = CEP290-B166/-280 targeting domain (RNA)
  source 1..17: mol_type = other RNA
ttcttgtggcagtaagg

SEQ ID NO: 667 - RNA, 17 nt, synthetic construct
  misc_feature 1..17: note = CEP290-B247/-B1215/-247 targeting domain (RNA)
  source 1..17: mol_type = other RNA
aagcatactttttttaa

SEQ ID NO: 668 - RNA, 17 nt, synthetic construct
  misc_feature 1..17: note = CEP290-B245/-261 targeting domain (RNA)
  source 1..17: mol_type = other RNA
caactggaagagagaaa

SEQ ID NO: 669 - RNA, 17 nt, synthetic construct
  misc_feature 1..17: note = CEP290-B167/-272 targeting domain (RNA)
  source 1..17: mol_type = other RNA
tatgcttaagaaaaaaa

SEQ ID NO: 670 - RNA, 17 nt, synthetic construct
  misc_feature 1..17: note = CEP290-B171/-283 targeting domain (RNA)
  source 1..17: mol_type = other RNA
ttttattatctttattg

SEQ ID NO: 671 - RNA, 20 nt, synthetic construct
  misc_feature 1..20: note = CEP290-B140/-B1151/-218/-1467 targeting domain (RNA)
  source 1..20: mol_type = other RNA
ctagatgacatgaggtaagt

SEQ ID NO: 672 - RNA, 20 nt, synthetic construct
  misc_feature 1..20: note = CEP290-B147/-B1019/-1886 targeting domain (RNA)
  source 1..20: mol_type = other RNA
ttttaaggcggggagtcaca

SEQ ID NO: 673 - RNA, 20 nt, synthetic construct
  misc_feature 1..20: note = CEP290-B73 targeting domain (RNA)
  source 1..20: mol_type = other RNA
tcctgtttcaaaacttgttc

SEQ ID NO: 674 - RNA, 20 nt, synthetic construct
  misc_feature 1..20: note = CEP290-B206 targeting domain (RNA)
  source 1..20: mol_type = other RNA
tgtgttgagtatctcctgtt

SEQ ID NO: 675 - RNA, 20 nt, synthetic construct
  misc_feature 1..20: note = CEP290-B57/-223 targeting domain (RNA)
  source 1..20: mol_type = other RNA
ctcttgctctagatgacatg

SEQ ID NO: 676 - RNA, 20 nt, synthetic construct
  misc_feature 1..20: note = CEP290-B82/-B1136/-206/-1475 targeting domain (RNA)
  source 1..20: mol_type = other RNA
cagtaaggaggatgtaagac

SEQ ID NO: 677 - RNA, 20 nt, synthetic construct
  misc_feature 1..20: note = CEP290-B265/-163 targeting domain (RNA)
  source 1..20: mol_type = other RNA
agatgacatgaggtaagtag

SEQ ID NO: 678 - RNA, 20 nt, synthetic construct
  misc_feature 1..20: note = CEP290-B105/-B1098/-150/-1805 targeting domain (RNA)
  source 1..20: mol_type = other RNA
aattcactgagcaaaacaac

SEQ ID NO: 679 - RNA, 20 nt, synthetic construct
  misc_feature 1..20: note = CEP290-B239 targeting domain (RNA)
  source 1..20: mol_type = other RNA
tcacatgggagtcacagggt

SEQ ID NO: 680 - RNA, 20 nt, synthetic construct
  misc_feature 1..20: note = CEP290-B180/-B1170/-1741 targeting domain (RNA)
  source 1..20: mol_type = other RNA
tagatgacatgaggtaagta

SEQ ID NO: 681 - RNA, 20 nt, synthetic construct
  misc_feature 1..20: note = CEP290-B103/-B1204/-669 targeting domain (RNA)
  source 1..20: mol_type = other RNA
ttttgacagtttttaaggcg

SEQ ID NO: 682 - RNA, 20 nt, synthetic construct
  misc_feature 1..20: note = CEP290-B254 targeting domain (RNA)
  source 1..20: mol_type = other RNA
taatacatgagagtgattag

SEQ ID NO: 683 - RNA, 20 nt, synthetic construct
  misc_feature 1..20: note = CEP290-B134 targeting domain (RNA)
  source 1..20: mol_type = other RNA
tagttctgcatcttatacat

SEQ ID NO: 684 - RNA, 20 nt, synthetic construct
  misc_feature 1..20: note = CEP290-B240/-B1160/-235/-1838 targeting domain (RNA)
  source 1..20: mol_type = other RNA
cttttgacagtttttaaggc

SEQ ID NO: 685 - RNA, 20 nt, synthetic construct
  misc_feature 1..20: note = CEP290-B116/-B1087/-123/-1809 targeting domain (RNA)
  source 1..20: mol_type = other RNA
aaaagacttatattccatta

SEQ ID NO: 686 - RNA, 20 nt, synthetic construct
  misc_feature 1..20: note = CEP290-B39/-180 targeting domain (RNA)
  source 1..20: mol_type = other RNA
atacataagaaagaacactg

SEQ ID NO: 687 - RNA, 20 nt, synthetic construct
  misc_feature 1..20: note = CEP290-B91/-B1096/-145/-1685 targeting domain (RNA)
  source 1..20: mol_type = other RNA
aatataagtcttttgatata

SEQ ID NO: 688 - RNA, 20 nt, synthetic construct
  misc_feature 1..20: note = CEP290-B126/-B1188/-1910 targeting domain (RNA)
  source 1..20: mol_type = other RNA
tgatcattcttgtggcagta

SEQ ID NO: 689 - RNA, 20 nt, synthetic construct
  misc_feature 1..20: note = CEP290-B202/-B1164/-691 targeting domain (RNA)
  source 1..20: mol_type = other RNA
tacatatctgtcttccttaa

SEQ ID NO: 690 - RNA, 20 nt, synthetic construct
  misc_feature 1..20: note = CEP290-B152/-B1157/-228/-1716 targeting domain (RNA)
  source 1..20: mol_type = other RNA
cttaagcatactttttttaa

SEQ ID NO: 691 - RNA, 20 nt, synthetic construct
  misc_feature 1..20: note = CEP290-B77/-126 targeting domain (RNA)
  source 1..20: mol_type = other RNA
aaacaactggaagagagaaa

SEQ ID NO: 692 - RNA, 20 nt, synthetic construct
  misc_feature 1..20: note = CEP290-B145/-273 targeting domain (RNA)
  source 1..20: mol_type = other RNA
tcattcttgtggcagtaagg

SEQ ID NO: 693 - RNA, 20 nt, synthetic construct
  misc_feature 1..20: note = CEP290-B72/-249 targeting domain (RNA)
  source 1..20: mol_type = other RNA
aagtatgcttaagaaaaaaa

SEQ ID NO: 694 - RNA, 20 nt, synthetic construct
  misc_feature 1..20: note = CEP290-B221/-260 targeting domain (RNA)
  source 1..20: mol_type = other RNA
attttttattatctttattg

SEQ ID NO: 695 - RNA, 17 nt, synthetic construct
  misc_feature 1..17: note = CEP290-B424/-B1269/-219 targeting domain (RNA)
  source 1..17: mol_type = other RNA
ctaggactttctaatgc

SEQ ID NO: 696 - RNA, 17 nt, synthetic construct
  misc_feature 1..17: note = CEP290-B425/-B1254/-186 targeting domain (RNA)
  source 1..17: mol_type = other RNA
atctaagatcctttcac

SEQ ID NO: 697 - RNA, 17 nt, synthetic construct
  misc_feature 1..17: note = CEP290-B426 targeting domain (RNA)
  source 1..17: mol_type = other RNA
ttatcaccacactaaat

SEQ ID NO: 698 - RNA, 17 nt, synthetic construct
  misc_feature 1..17: note = CEP290-B427/-B495/-167 targeting domain (RNA)
  source 1..17: mol_type = other RNA
agctcaaaagcttttgc

SEQ ID NO: 699 - RNA, 17 nt, synthetic construct
  misc_feature 1..17: note = CEP290-B428/-B529 targeting domain (RNA)
  source 1..17: mol_type = other RNA
tgttctgagtagctttc

SEQ ID NO: 700 - RNA, 17 nt, synthetic construct
  misc_feature 1..17: note = CEP290-B429/-157 targeting domain (RNA)
  source 1..17: mol_type = other RNA
actttctaatgctggag

SEQ ID NO: 701 - RNA, 17 nt, synthetic construct
  misc_feature 1..17: note = CEP290-B430/-222 targeting domain (RNA)
  source 1..17: mol_type = other RNA
ctctataccttttactg

SEQ ID NO: 702 - RNA, 17 nt, synthetic construct
  misc_feature 1..17: note = CEP290-B431/-200 targeting domain (RNA)
  source 1..17: mol_type = other RNA
caagatgtctcttgcct

SEQ ID NO: 703 - RNA, 17 nt, synthetic construct
  misc_feature 1..17: note = CEP290-B432/-194 targeting domain (RNA)
  source 1..17: mol_type = other RNA
attatgcctatttagtg

SEQ ID NO: 704 - RNA, 17 nt, synthetic construct
  misc_feature 1..17: note = CEP290-B433/-B513/-B1257/-B1258/-189 targeting domain (RNA)
  source 1..17: mol_type = other RNA
atgactcataatttagt

SEQ ID NO: 705 - RNA, 17 nt, synthetic construct
  misc_feature 1..17: note = CEP290-B434 targeting domain (RNA)
  source 1..17: mol_type = other RNA
tagaggcttatggattt

SEQ ID NO: 706 - RNA, 17 nt, synthetic construct
  misc_feature 1..17: note = CEP290-B435/-B490 targeting domain (RNA)
  source 1..17: mol_type = other RNA
tattctactcctgtgaa

SEQ ID NO: 707 - RNA, 17 nt, synthetic construct
  misc_feature 1..17: note = CEP290-B437/-217 targeting domain (RNA)
  source 1..17: mol_type = other RNA
ctaatgctggagaggat

SEQ ID NO: 708 - RNA, 17 nt, synthetic construct
  misc_feature 1..17: note = CEP290-B438/-172 targeting domain (RNA)
  source 1..17: mol_type = other RNA
aggcaagagacatcttg

SEQ ID NO: 709 - RNA, 17 nt, synthetic construct
  misc_feature 1..17: note = CEP290-B439/-B1234/-165 targeting domain (RNA)
  source 1..17: mol_type = other RNA
agcctctatttctgatg

SEQ ID NO: 710 - RNA, 17 nt, synthetic construct
  misc_feature 1..17: note = CEP290-B440/-204 targeting domain (RNA)
  source 1..17: mol_type = other RNA
cagcattagaaagtcct

SEQ ID NO: 711 - RNA, 17 nt, synthetic construct
  misc_feature 1..17: note = CEP290-B441/-B485/-B299/-B531/-225/-1952 targeting domain (RNA)
  source 1..17: mol_type = other RNA
ctgcttttgccaaagag

SEQ ID NO: 712 - RNA, 17 nt, synthetic construct
  misc_feature 1..17: note = CEP290-B442/-B492/-154 targeting domain (RNA)
  source 1..17: mol_type = other RNA
acataatcacctctctt

SEQ ID NO: 713 - RNA, 17 nt, synthetic construct
  misc_feature 1..17: note = CEP290-B443 targeting domain (RNA)
  source 1..17: mol_type = other RNA
tcagaaatagaggctta

SEQ ID NO: 714 - RNA, 17 nt, synthetic construct
  misc_feature 1..17: note = CEP290-B446 targeting domain (RNA)
  source 1..17: mol_type = other RNA
ttcctcatcagaaatag

SEQ ID NO: 715 - RNA, 17 nt, synthetic construct
  misc_feature 1..17: note = CEP290-B447/-B1220/-250 targeting domain (RNA)
  source 1..17: mol_type = other RNA
acagaggacatggagaa

SEQ ID NO: 716 - RNA, 17 nt, synthetic construct
  misc_feature 1..17: note = CEP290-B448 targeting domain (RNA)
  source 1..17: mol_type = other RNA
tggagaggataggacag

SEQ ID NO: 717 - RNA, 17 nt, synthetic construct
  misc_feature 1..17: note = CEP290-B449/-B1235/-169 targeting domain (RNA)
  source 1..17: mol_type = other RNA
aggaagatgaacaaatc

SEQ ID NO: 718 - RNA, 17 nt, synthetic construct
  misc_feature 1..17: note = CEP290-B450/-B1231/-257 targeting domain (RNA)
  source 1..17: mol_type = other RNA
agatgaaaaatactctt

SEQ ID NO: 719 - RNA, 20 nt, synthetic construct
  misc_feature 1..20: note = CEP290-B455/-171 targeting domain (RNA)
  source 1..20: mol_type = other RNA
aggactttctaatgctggag

SEQ ID NO: 720 - RNA, 20 nt, synthetic construct
  misc_feature 1..20: note = CEP290-B457/-221 targeting domain (RNA)
  source 1..20: mol_type = other RNA
ctccagcattagaaagtcct

SEQ ID NO: 721 - RNA, 20 nt, synthetic construct
  misc_feature 1..20: note = CEP290-B458/-B506/-B1094/-B1095/-137/-388 targeting domain (RNA)
  source 1..20: mol_type = other RNA
aacatgactcataatttagt

SEQ ID NO: 722 - RNA, 20 nt, synthetic construct
  misc_feature 1..20: note = CEP290-B460/-187 targeting domain (RNA)
  source 1..20: mol_type = other RNA
atcttcctcatcagaaatag

SEQ ID NO: 723 - RNA, 20 nt, synthetic construct
  misc_feature 1..20: note = CEP290-B461/-B1114/-178/-1206 targeting domain (RNA)
  source 1..20: mol_type = other RNA
ataagcctctatttctgatg

SEQ ID NO: 724 - RNA, 20 nt, synthetic construct
  misc_feature 1..20: note = CEP290-B462/-B500 targeting domain (RNA)
  source 1..20: mol_type = other RNA
tcttattctactcctgtgaa

SEQ ID NO: 725 - RNA, 20 nt, synthetic construct
  misc_feature 1..20: note = CEP290-B463/-B521/-B304/-B478/-224/-1951 targeting domain (RNA
  source 1..20: mol_type = other RNA
ctgctgcttttgccaaagag

SEQ ID NO: 726 - RNA, 20 nt, synthetic construct
  misc_feature 1..20: note = CEP290-B464 targeting domain (RNA)
  source 1..20: mol_type = other RNA
tttctaatgctggagaggat

SEQ ID NO: 727 - RNA, 20 nt, synthetic construct
  misc_feature 1..20: note = CEP290-134/-B466 targeting domain (RNA)
  source 1..20: mol_type = other RNA
aaattatcaccacactaaat

SEQ ID NO: 728 - RNA, 20 nt, synthetic construct
  misc_feature 1..20: note = CEP290-B467/-234 targeting domain (RNA)
  source 1..20: mol_type = other RNA
cttgttctgtcctcagtaaa

SEQ ID NO: 729 - RNA, 20 nt, synthetic construct
  misc_feature 1..20: note = CEP290-B468/-125 targeting domain (RNA)
  source 1..20: mol_type = other RNA
aaaattatgcctatttagtg

SEQ ID NO: 730 - RNA, 20 nt, synthetic construct
  misc_feature 1..20: note = CEP290-B469 targeting domain (RNA)
  source 1..20: mol_type = other RNA
tcatcagaaatagaggctta

SEQ ID NO: 731 - RNA, 20 nt, synthetic construct
  misc_feature 1..20: note = CEP290-B133/-B470 targeting domain (RNA)
  source 1..20: mol_type = other RNA
aaatagaggcttatggattt

SEQ ID NO: 732 - RNA, 20 nt, synthetic construct
  misc_feature 1..20: note = CEP290-B471 targeting domain (RNA)
  source 1..20: mol_type = other RNA
tgctggagaggataggacag

SEQ ID NO: 733 - RNA, 20 nt, synthetic construct
  misc_feature 1..20: note = CEP290-B472/-B1120/-191/-1083 targeting domain (RNA)
  source 1..20: mol_type = other RNA
atgaggaagatgaacaaatc

SEQ ID NO: 734 - RNA, 20 nt, synthetic construct
  misc_feature 1..20: note = CEP290-B474/-B1158/-232/-459 targeting domain (RNA)
  source 1..20: mol_type = other RNA
cttatctaagatcctttcac

SEQ ID NO: 735 - RNA, 20 nt, synthetic construct
  misc_feature 1..20: note = CEP290-B475/-B1104/-162/-840 targeting domain (RNA)
  source 1..20: mol_type = other RNA
agaggataggacagaggaca

SEQ ID NO: 736 - RNA, 20 nt, synthetic construct
  misc_feature 1..20: note = CEP290-B476/-B1110/-170/-852 targeting domain (RNA)
  source 1..20: mol_type = other RNA
aggacagaggacatggagaa

SEQ ID NO: 737 - RNA, 20 nt, synthetic construct
  misc_feature 1..20: note = CEP290-B477/-B1090/-130/-846 targeting domain (RNA)
  source 1..20: mol_type = other RNA
aaagatgaaaaatactcttt

SEQ ID NO: 738-746 - skipped (9 entries)

SEQ ID NO: 747 - RNA, 20 nt, synthetic construct
  misc_feature 1..20: note = CEP290-B1009/-1700 targeting domain (RNA)
  source 1..20: mol_type = other RNA
cctacttacctcatgtcatc

SEQ ID NO: 748 - RNA, 20 nt, synthetic construct
  misc_feature 1..20: note = CEP290-B1010/-B1152/-1093 targeting domain (RNA)
  source 1..20: mol_type = other RNA
ctatgagccagcaaaagctt

SEQ ID NO: 749 - RNA, 20 nt, synthetic construct
  misc_feature 1..20: note = CEP290-B1011/-B1102/-352 targeting domain (RNA)
  source 1..20: mol_type = other RNA
acgttgttctgagtagcttt

SEQ ID NO: 750 - RNA, 20 nt, synthetic construct
  misc_feature 1..20: note = CEP290-B1012/-B1138/-875 targeting domain (RNA)
  source 1..20: mol_type = other RNA
catagagacacattcagtaa

SEQ ID NO: 751 - RNA, 17 nt, synthetic construct
  misc_feature 1..17: note = CEP290-B1013 targeting domain (RNA)
  source 1..17: mol_type = other RNA
acttacctcatgtcatc

SEQ ID NO: 752 - RNA, 17 nt, synthetic construct
  misc_feature 1..17: note = CEP290-B1014/-B1297 targeting domain (RNA)
  source 1..17: mol_type = other RNA
tgagccagcaaaagctt

SEQ ID NO: 753 - RNA, 17 nt, synthetic construct
  misc_feature 1..17: note = CEP290-B1015/-B1317 targeting domain (RNA)
  source 1..17: mol_type = other RNA
ttgttctgagtagcttt

SEQ ID NO: 754 - RNA, 17 nt, synthetic construct
  misc_feature 1..17: note = CEP290-B1016/-B1228 targeting domain (RNA)
  source 1..17: mol_type = other RNA
agagacacattcagtaa

SEQ ID NO: 755 - RNA, 20 nt, synthetic construct
  misc_feature 1..20: note = CEP290-B1018/-626 targeting domain (RNA)
  source 1..20: mol_type = other RNA
caaaagctaccggttacctg

SEQ ID NO: 756 - skipped

SEQ ID NO: 757 - RNA, 20 nt, synthetic construct
  misc_feature 1..20: note = CEP290-B1020/-1889 targeting domain (RNA)
  source 1..20: mol_type = other RNA
tgtcaaaagctaccggttac

SEQ ID NO: 758 - RNA, 17 nt, synthetic construct
  misc_feature 1..17: note = CEP290-B1022 targeting domain (RNA)
  source 1..17: mol_type = other RNA
aagctaccggttacctg

SEQ ID NO: 759 - RNA, 17 nt, synthetic construct
  misc_feature 1..17: note = CEP290-B1024 targeting domain (RNA)
  source 1..17: mol_type = other RNA
caaaagctaccggttac

SEQ ID NO: 760 - RNA, 20 nt, synthetic construct
  misc_feature 1..20: note = CEP290-B1025/-B1171/-1166 targeting domain (RNA)
  source 1..20: mol_type = other RNA
taggaatcctgaaagctact

SEQ ID NO: 761 - RNA, 20 nt, synthetic construct
  misc_feature 1..20: note = CEP290-B1026/-B1132/-452 targeting domain (RNA)
  source 1..20: mol_type = other RNA
cagaacaacgttttcattta

SEQ ID NO: 762 - RNA, 20 nt, synthetic construct
  misc_feature 1..20: note = CEP290-B1027/-B1126/-877 targeting domain (RNA)
  source 1..20: mol_type = other RNA
caaaagcttttgctggctca

SEQ ID NO: 763 - RNA, 20 nt, synthetic construct
  misc_feature 1..20: note = CEP290-B1028/-B1106/-363 targeting domain (RNA)
  source 1..20: mol_type = other RNA
agcaaaagcttttgagctaa

SEQ ID NO: 764 - RNA, 20 nt, synthetic construct
  misc_feature 1..20: note = CEP290-B1118/-365 targeting domain (RNA)
  source 1..20: mol_type = other RNA
atcttattctactcctgtga

SEQ ID NO: 765 - RNA, 17 nt, synthetic construct
  misc_feature 1..17: note = CEP290-B1030/-B1209 targeting domain (RNA)
  source 1..17: mol_type = other RNA
aacaacgttttcattta

SEQ ID NO: 766 - RNA, 17 nt, synthetic construct
  misc_feature 1..17: note = CEP290-B1031/-B1217 targeting domain (RNA)
  source 1..17: mol_type = other RNA
aagcttttgctggctca

SEQ ID NO: 767 - RNA, 17 nt, synthetic construct
  misc_feature 1..17: note = CEP290-B1032/-B1206 targeting domain (RNA)
  source 1..17: mol_type = other RNA
aaaagcttttgagctaa

SEQ ID NO: 768 - RNA, 17 nt, synthetic construct
  misc_feature 1..17: note = CEP290-B1033/-B1309 targeting domain (RNA)
  source 1..17: mol_type = other RNA
ttattctactcctgtga

SEQ ID NO: 769 - RNA, 20 nt, synthetic construct
  misc_feature 1..20: note = CEP290-B1034/-1730 targeting domain (RNA)
  source 1..20: mol_type = other RNA
gaaacaggaatagaaattca

SEQ ID NO: 770 - RNA, 20 nt, synthetic construct
  misc_feature 1..20: note = CEP290-B1037/-1551 targeting domain (RNA)
  source 1..20: mol_type = other RNA
gaatataagtcttttgatat

SEQ ID NO: 771 - RNA, 20 nt, synthetic construct
  misc_feature 1..20: note = CEP290-B1038/-1534 targeting domain (RNA)
  source 1..20: mol_type = other RNA
gagaaatggttccctatata

SEQ ID NO: 772 - RNA, 20 nt, synthetic construct
  misc_feature 1..20: note = CEP290-B1039/-1295 targeting domain (RNA)
  source 1..20: mol_type = other RNA
gagaggataggacagaggac

SEQ ID NO: 773 - RNA, 20 nt, synthetic construct
  misc_feature 1..20: note = CEP290-B1040/-1292 targeting domain (RNA)
  source 1..20: mol_type = other RNA
gatgaggaagatgaacaaat

SEQ ID NO: 774 - RNA, 20 nt, synthetic construct
  misc_feature 1..20: note = CEP290-B1042/-937 targeting domain (RNA)
  source 1..20: mol_type = other RNA
gatttgttcatcttcctcat

SEQ ID NO: 775 - RNA, 20 nt, synthetic construct
  misc_feature 1..20: note = CEP290-B1043/-1875 targeting domain (RNA)
  source 1..20: mol_type = other RNA
gcagtaaggaggatgtaaga

SEQ ID NO: 776 - RNA, 20 nt, synthetic construct
  misc_feature 1..20: note = CEP290-B1046/-B1047/-950 targeting domain (RNA)
  source 1..20: mol_type = other RNA
gctttctgctgcttttgcca

SEQ ID NO: 777 - skipped

SEQ ID NO: 778 - RNA, 20 nt, synthetic construct
  misc_feature 1..20: note = CEP290-B1049/-959 targeting domain (RNA)
  source 1..20: mol_type = other RNA
ggaaagatgaaaaatactct

SEQ ID NO: 779 - RNA, 20 nt, synthetic construct
  misc_feature 1..20: note = CEP290-B1050/-1544 targeting domain (RNA)
  source 1..20: mol_type = other RNA
ggaggatgtaagactggaga

SEQ ID NO: 780 - RNA, 20 nt, synthetic construct
  misc_feature 1..20: note = CEP290-B1052/-B1053/-940 targeting domain (RNA)
  source 1..20: mol_type = other RNA
ggtgattatgttacttttta

SEQ ID NO: 781 - skipped

SEQ ID NO: 782 - RNA, 20 nt, synthetic construct
  misc_feature 1..20: note = CEP290-B1056/-1506 targeting domain (RNA)
  source 1..20: mol_type = other RNA
gtggtgtcaaatatggtgct

SEQ ID NO: 783 - RNA, 17 nt, synthetic construct
  misc_feature 1..17: note = CEP290-B1057 targeting domain (RNA)
  source 1..17: mol_type = other RNA
gaaaaaaaaggtaatgc

SEQ ID NO: 784 - RNA, 17 nt, synthetic construct
  misc_feature 1..17: note = CEP290-B1058 targeting domain (RNA)
  source 1..17: mol_type = other RNA
gaaaagagcacgtacaa

SEQ ID NO: 785 - RNA, 17 nt, synthetic construct
  misc_feature 1..17: note = CEP290-B1060 targeting domain (RNA)
  source 1..17: mol_type = other RNA
gaatgatcattctaaac

SEQ ID NO: 786 - RNA, 17 nt, synthetic construct
  misc_feature 1..17: note = CEP290-B1061 targeting domain (RNA)
  source 1..17: mol_type = other RNA
gacagaggacatggaga

SEQ ID NO: 787 - RNA, 17 nt, synthetic construct
  misc_feature 1..17: note = CEP290-B1062 targeting domain (RNA)
  source 1..17: mol_type = other RNA
gactttctaatgctgga

SEQ ID NO: 788 - RNA, 17 nt, synthetic construct
  misc_feature 1..17: note = CEP290-B1063 targeting domain (RNA)
  source 1..17: mol_type = other RNA
gagagtgattagtggtg

SEQ ID NO: 789 - RNA, 17 nt, synthetic construct
  misc_feature 1..17: note = CEP290-B1064 targeting domain (RNA)
  source 1..17: mol_type = other RNA
gagcaaaacaactggaa

SEQ ID NO: 790 - RNA, 17 nt, synthetic construct
  misc_feature 1..17: note = CEP290-B1065 targeting domain (RNA)
  source 1..17: mol_type = other RNA
gaggaagatgaacaaat

SEQ ID NO: 791 - RNA, 17 nt, synthetic construct
  misc_feature 1..17: note = CEP290-B1066 targeting domain (RNA)
  source 1..17: mol_type = other RNA
gagtcacatgggagtca

SEQ ID NO: 792 - RNA, 17 nt, synthetic construct
  misc_feature 1..17: note = CEP290-B1067/-B1068 targeting domain (RNA)
  source 1..17: mol_type = other RNA
gatcttattctactcct

SEQ ID NO: 793 - RNA, 17 nt, synthetic construct
  misc_feature 1..17: note = CEP290-B1071/-B1072 targeting domain (RNA)
  source 1..17: mol_type = other RNA
gattatgttacttttta

SEQ ID NO: 794 - RNA, 17 nt, synthetic construct
  misc_feature 1..17: note = CEP290-B1073 targeting domain (RNA)
  source 1..17: mol_type = other RNA
gcaaaacaactggaaga

SEQ ID NO: 795 - RNA, 17 nt, synthetic construct
  misc_feature 1..17: note = CEP290-B1077 targeting domain (RNA)
  source 1..17: mol_type = other RNA
ggatgtaagactggaga

SEQ ID NO: 796 - RNA, 17 nt, synthetic construct
  misc_feature 1..17: note = CEP290-B1078 targeting domain (RNA)
  source 1..17: mol_type = other RNA
gtaaggaggatgtaaga

SEQ ID NO: 797 - RNA, 17 nt, synthetic construct
  misc_feature 1..17: note = CEP290-B1079 targeting domain (RNA)
  source 1..17: mol_type = other RNA
gtatctcctgtttggca

SEQ ID NO: 798 - RNA, 17 nt, synthetic construct
  misc_feature 1..17: note = CEP290-B1080 targeting domain (RNA)
  source 1..17: mol_type = other RNA
gtcatctagagcaagag

SEQ ID NO: 799 - RNA, 17 nt, synthetic construct
  misc_feature 1..17: note = CEP290-B1081 targeting domain (RNA)
  source 1..17: mol_type = other RNA
gtcctcagtaaaaggta

SEQ ID NO: 800 - RNA, 17 nt, synthetic construct
  misc_feature 1..17: note = CEP290-B1082 targeting domain (RNA)
  source 1..17: mol_type = other RNA
gtgaaaggatcttagat

SEQ ID NO: 801 - RNA, 17 nt, synthetic construct
  misc_feature 1..17: note = CEP290-B1083 targeting domain (RNA)
  source 1..17: mol_type = other RNA
gtgctcttttctatata

SEQ ID NO: 802 - RNA, 17 nt, synthetic construct
  misc_feature 1..17: note = CEP290-B1084 targeting domain (RNA)
  source 1..17: mol_type = other RNA
gtgtcaaatatggtgct

SEQ ID NO: 803 - RNA, 17 nt, synthetic construct
  misc_feature 1..17: note = CEP290-B1085 targeting domain (RNA)
  source 1..17: mol_type = other RNA
gttccctatatatagaa

SEQ ID NO: 804 - skipped

SEQ ID NO: 805 - RNA, 20 nt, synthetic construct
  misc_feature 1..20: note = CEP290-B1088/-B1089/-829 targeting domain (RNA)
  source 1..20: mol_type = other RNA
aaacatgactcataatttag

SEQ ID NO: 806-807 - skipped (2 entries)

SEQ ID NO: 808 - RNA, 20 nt, synthetic construct
  misc_feature 1..20: note = CEP290-B1091/-1440 targeting domain (RNA)
  source 1..20: mol_type = other RNA
aaattcactgagcaaaacaa

SEQ ID NO: 809 - RNA, 20 nt, synthetic construct
  misc_feature 1..20: note = CEP290-B1092/-1383 targeting domain (RNA)
  source 1..20: mol_type = other RNA
aacaagttttgaaacaggaa

SEQ ID NO: 810 - RNA, 20 nt, synthetic construct
  misc_feature 1..20: note = CEP290-B1093/-1372 targeting domain (RNA)
  source 1..20: mol_type = other RNA
aacaggagatactcaacaca

SEQ ID NO: 811-813 - skipped (3 entries)

SEQ ID NO: 814 - RNA, 20 nt, synthetic construct
  misc_feature 1..20: note = CEP290-B1097/-1663 targeting domain (RNA)
  source 1..20: mol_type = other RNA
aatcactctcatgtattagc

SEQ ID NO: 815 - skipped

SEQ ID NO: 816 - RNA, 20 nt, synthetic construct
  misc_feature 1..20: note = CEP290-B1099/-1688 targeting domain (RNA)
  source 1..20: mol_type = other RNA
acaaaagaacatacataaga

SEQ ID NO: 817 - RNA, 20 nt, synthetic construct
  misc_feature 1..20: note = CEP290-B1100/-1375 targeting domain (RNA)
  source 1..20: mol_type = other RNA
acgtacaaaagaacatacat

SEQ ID NO: 818 - skipped

SEQ ID NO: 819 - RNA, 20 nt, synthetic construct
  misc_feature 1..20: note = CEP290-B1103/-1388 targeting domain (RNA)
  source 1..20: mol_type = other RNA
actgagcaaaacaactggaa

SEQ ID NO: 820 - skipped

SEQ ID NO: 821 - RNA, 20 nt, synthetic construct
  misc_feature 1..20: note = CEP290-B1105/-1787 targeting domain (RNA)
  source 1..20: mol_type = other RNA
agatgcagaactagtgtaga

SEQ ID NO: 822 - skipped

SEQ ID NO: 823 - RNA, 20 nt, synthetic construct
  misc_feature 1..20: note = CEP290-B1107/-790 targeting domain (RNA)
  source 1..20: mol_type = other RNA
agcattagaaagtcctaggc

SEQ ID NO: 824 - RNA, 20 nt, synthetic construct
  misc_feature 1..20: note = CEP290-B1108/-1782 targeting domain (RNA)
  source 1..20: mol_type = other RNA
agcttgaactctgtgccaaa

SEQ ID NO: 825 - RNA, 20 nt, synthetic construct
  misc_feature 1..20: note = CEP290-B1109/-1801 targeting domain (RNA)
  source 1..20: mol_type = other RNA
agcttttgacagtttttaag

SEQ ID NO: 826 - skipped

SEQ ID NO: 827 - RNA, 20 nt, synthetic construct
  misc_feature 1..20: note = CEP290-B1111/-410 targeting domain (RNA)
  source 1..20: mol_type = other RNA
aggataggacagaggacatg

SEQ ID NO: 828 - RNA, 20 nt, synthetic construct
  misc_feature 1..20: note = CEP290-B1112/-1393 targeting domain (RNA)
  source 1..20: mol_type = other RNA
aggtaatgcctgaacaagtt

SEQ ID NO: 829 - RNA, 20 nt, synthetic construct
  misc_feature 1..20: note = CEP290-B1113/-1406 targeting domain (RNA)
  source 1..20: mol_type = other RNA
ataagaaagaacactgtggt

SEQ ID NO: 830 - skipped

SEQ ID NO: 831 - RNA, 20 nt, synthetic construct
  misc_feature 1..20: note = CEP290-B1115/-1779 targeting domain (RNA)
  source 1..20: mol_type = other RNA
atacatgagagtgattagtg

SEQ ID NO: 832 - RNA, 20 nt, synthetic construct
  misc_feature 1..20: note = CEP290-B1116/-1678 targeting domain (RNA)
  source 1..20: mol_type = other RNA
atagaaaagagcacgtacaa

SEQ ID NO: 833 - RNA, 20 nt, synthetic construct
  misc_feature 1..20: note = CEP290-B1117/-601 targeting domain (RNA)
  source 1..20: mol_type = other RNA
atcattcttgtggcagtaag

SEQ ID NO: 834 - skipped

SEQ ID NO: 835 - RNA, 20 nt, synthetic construct
  misc_feature 1..20: note = CEP290-B1119/-358 targeting domain (RNA)
  source 1..20: mol_type = other RNA
atcttgtggataatgtatca

SEQ ID NO: 836 - skipped

SEQ ID NO: 837 - RNA, 20 nt, synthetic construct
  misc_feature 1..20: note = CEP290-B1121/-1798 targeting domain (RNA)
  source 1..20: mol_type = other RNA
atgatcattcttgtggcagt

SEQ ID NO: 838 - RNA, 20 nt, synthetic construct
  misc_feature 1..20: note = CEP290-B1122/-1075 targeting domain (RNA)
  source 1..20: mol_type = other RNA
atgctggagaggataggaca

SEQ ID NO: 839 - RNA, 20 nt, synthetic construct
  misc_feature 1..20: note = CEP290-B1123/-1683 targeting domain (RNA)
  source 1..20: mol_type = other RNA
atggttccctatatatagaa

SEQ ID NO: 840 - RNA, 20 nt, synthetic construct
  misc_feature 1..20: note = CEP290-B1124/-624 targeting domain (RNA)
  source 1..20: mol_type = other RNA
atttaatttgtttctgtgtg

SEQ ID NO: 841 - RNA, 20 nt, synthetic construct
  misc_feature 1..20: note = CEP290-B1125/-1712 targeting domain (RNA)
  source 1..20: mol_type = other RNA
caaaacctatgtataagatg

SEQ ID NO: 842 - RNA, 20 nt, synthetic construct
  misc_feature 1..20: note = CEP290-B1126/-1495 targeting domain (RNA)
  source 1..20: mol_type = other RNA
caaaagacttatattccatt

SEQ ID NO: 843 - skipped

SEQ ID NO: 844 - RNA, 20 nt, synthetic construct
  misc_feature 1..20: note = CEP290-B1128/-637 targeting domain (RNA)
  source 1..20: mol_type = other RNA
caagaatgatcattctaaac

SEQ ID NO: 845 - RNA, 20 nt, synthetic construct
  misc_feature 1..20: note = CEP290-B1129/-1461 targeting domain (RNA)
  source 1..20: mol_type = other RNA
cacagagttcaagctaatac

SEQ ID NO: 846 - RNA, 20 nt, synthetic construct
  misc_feature 1..20: note = CEP290-B1130/-629 targeting domain (RNA)
  source 1..20: mol_type = other RNA
cacagggtaggattcatgtt

SEQ ID NO: 847 - skipped

SEQ ID NO: 848 - RNA, 20 nt, synthetic construct
  misc_feature 1..20: note = CEP290-B1133/-632 targeting domain (RNA)
  source 1..20: mol_type = other RNA
cagagttcaagctaatacat

SEQ ID NO: 849 - RNA, 20 nt, synthetic construct
  misc_feature 1..20: note = CEP290-B1134/-B1135/-457 targeting domain (RNA)
  source 1..20: mol_type = other RNA
cagtaaatgaaaacgttgtt

SEQ ID NO: 850 - skipped

SEQ ID NO: 851 - RNA, 20 nt, synthetic construct
  misc_feature 1..20: note = CEP290-B1137/-879 targeting domain (RNA)
  source 1..20: mol_type = other RNA
cataagcctctatttctgat

SEQ ID NO: 852 - skipped

SEQ ID NO: 853 - RNA, 20 nt, synthetic construct
  misc_feature 1..20: note = CEP290-B1139/-1829 targeting domain (RNA)
  source 1..20: mol_type = other RNA
catctcttgctctagatgac

SEQ ID NO: 854 - RNA, 20 nt, synthetic construct
  misc_feature 1..20: note = CEP290-B1140/-1710 targeting domain (RNA)
  source 1..20: mol_type = other RNA
catgagagtgattagtggtg

SEQ ID NO: 855 - RNA, 20 nt, synthetic construct
  misc_feature 1..20: note = CEP290-B1141/-1709 targeting domain (RNA)
  source 1..20: mol_type = other RNA
catgtcatctagagcaagag

SEQ ID NO: 856 - RNA, 20 nt, synthetic construct
  misc_feature 1..20: note = CEP290-B1142/-B1143/-1117 targeting domain (RNA)
  source 1..20: mol_type = other RNA
catttactgaatgtgtctct

SEQ ID NO: 857 - RNA, 20 nt, synthetic construct
  misc_feature 1..20: note = CEP290-B1144/-1493 targeting domain (RNA)
  source 1..20: mol_type = other RNA
ccattaaaaaaagtatgctt

SEQ ID NO: 858 - RNA, 20 nt, synthetic construct
  misc_feature 1..20: note = CEP290-B1145/-1232 targeting domain (RNA)
  source 1..20: mol_type = other RNA
cctaggactttctaatgctg

SEQ ID NO: 859 - RNA, 20 nt, synthetic construct
  misc_feature 1..20: note = CEP290-B1146/-B1147/-888 targeting domain (RNA)
  source 1..20: mol_type = other RNA
cctctctttggcaaaagcag

SEQ ID NO: 860 - RNA, 20 nt, synthetic construct
  misc_feature 1..20: note = CEP290-B1148/-424 targeting domain (RNA)
  source 1..20: mol_type = other RNA
cctgtgaaaggatcttagat

SEQ ID NO: 861 - RNA, 20 nt, synthetic construct
  misc_feature 1..20: note = CEP290-B1150/-443 targeting domain (RNA)
  source 1..20: mol_type = other RNA
ctaagatcctttcacaggag

SEQ ID NO: 862-863 - skipped (2 entries)

SEQ ID NO: 864 - RNA, 20 nt, synthetic construct
  misc_feature 1..20: note = CEP290-B1153/-B1154/-885 targeting domain (RNA)
  source 1..20: mol_type = other RNA
ctcataatttagtaggaatc

SEQ ID NO: 865 - RNA, 20 nt, synthetic construct
  misc_feature 1..20: note = CEP290-B1155/-446 targeting domain (RNA)
  source 1..20: mol_type = other RNA
ctcatcagaaatagaggctt

SEQ ID NO: 866 - RNA, 20 nt, synthetic construct
  misc_feature 1..20: note = CEP290-B1156/-1114 targeting domain (RNA)
  source 1..20: mol_type = other RNA
ctctatttctgatgaggaag

SEQ ID NO: 867-868 - skipped (2 entries)

SEQ ID NO: 869 - RNA, 20 nt, synthetic construct
  misc_feature 1..20: note = CEP290-B1159/-1108 targeting domain (RNA)
  source 1..20: mol_type = other RNA
ctttctaatgctggagagga

SEQ ID NO: 870 - skipped

SEQ ID NO: 871 - RNA, 20 nt, synthetic construct
  misc_feature 1..20: note = CEP290-B1161/-52/-1645 targeting domain (RNA)
  source 1..20: mol_type = other RNA
taaaactaagacactgccaa

SEQ ID NO: 872 - RNA, 20 nt, synthetic construct
  misc_feature 1..20: note = CEP290-B1162/-1760 targeting domain (RNA)
  source 1..20: mol_type = other RNA
taagaaaaaaaaggtaatgc

SEQ ID NO: 873 - RNA, 20 nt, synthetic construct
  misc_feature 1..20: note = CEP290-B1163/-1318 targeting domain (RNA)
  source 1..20: mol_type = other RNA
taatgctggagaggatagga

SEQ ID NO: 874 - skipped

SEQ ID NO: 875 - RNA, 20 nt, synthetic construct
  misc_feature 1..20: note = CEP290-B1165/-661 targeting domain (RNA)
  source 1..20: mol_type = other RNA
tacatcctccttactgccac

SEQ ID NO: 876 - RNA, 20 nt, synthetic construct
  misc_feature 1..20: note = CEP290-B1167/-1567 targeting domain (RNA)
  source 1..20: mol_type = other RNA
tacctcatgtcatctagagc

SEQ ID NO: 877 - RNA, 20 nt, synthetic construct
  misc_feature 1..20: note = CEP290-B1168/-1604 targeting domain (RNA)
  source 1..20: mol_type = other RNA
tacgtgctcttttctatata

SEQ ID NO: 878 - RNA, 20 nt, synthetic construct
  misc_feature 1..20: note = CEP290-B1169/-675 targeting domain (RNA)
  source 1..20: mol_type = other RNA
tagagcaagagatgaactag

SEQ ID NO: 879-880 - skipped (2 entries)

SEQ ID NO: 881 - RNA, 20 nt, synthetic construct
  misc_feature 1..20: note = CEP290-B1172/-1040 targeting domain (RNA)
  source 1..20: mol_type = other RNA
taggacagaggacatggaga

SEQ ID NO: 882 - RNA, 20 nt, synthetic construct
  misc_feature 1..20: note = CEP290-B1173/-473 targeting domain (RNA)
  source 1..20: mol_type = other RNA
taggactttctaatgctgga

SEQ ID NO: 883 - RNA, 20 nt, synthetic construct
  misc_feature 1..20: note = CEP290-B1174/-1594 targeting domain (RNA)
  source 1..20: mol_type = other RNA
tcactgagcaaaacaactgg

SEQ ID NO: 884 - RNA, 20 nt, synthetic construct
  misc_feature 1..20: note = CEP290-B1175/-B1176/-1333 targeting domain (RNA)
  source 1..20: mol_type = other RNA
tcatgtttatcaatattatt

SEQ ID NO: 885 - RNA, 20 nt, synthetic construct
  misc_feature 1..20: note = CEP290-B1177/-1149 targeting domain (RNA)
  source 1..20: mol_type = other RNA
tccacaagatgtctcttgcc

SEQ ID NO: 886 - RNA, 20 nt, synthetic construct
  misc_feature 1..20: note = CEP290-B1178/-1319 targeting domain (RNA)
  source 1..20: mol_type = other RNA
tccataagcctctatttctg

SEQ ID NO: 887 - RNA, 20 nt, synthetic construct
  misc_feature 1..20: note = CEP290-B1179/-523 targeting domain (RNA)
  source 1..20: mol_type = other RNA
tcctaggcaagagacatctt

SEQ ID NO: 888 - RNA, 20 nt, synthetic construct
  misc_feature 1..20: note = CEP290-B1180/-1902 targeting domain (RNA)
  source 1..20: mol_type = other RNA
tctagatgacatgaggtaag

SEQ ID NO: 889 - RNA, 20 nt, synthetic construct
  misc_feature 1..20: note = CEP290-B1181/-1160 targeting domain (RNA)
  source 1..20: mol_type = other RNA
tctataccttttactgagga

SEQ ID NO: 890 - RNA, 20 nt, synthetic construct
  misc_feature 1..20: note = CEP290-B1182/-540 targeting domain (RNA)
  source 1..20: mol_type = other RNA
tctgtcctcagtaaaaggta

SEQ ID NO: 891 - RNA, 20 nt, synthetic construct
  misc_feature 1..20: note = CEP290-B1183/-1650 targeting domain (RNA)
  source 1..20: mol_type = other RNA
tcttaagcatacttttttta

SEQ ID NO: 892 - RNA, 20 nt, synthetic construct
  misc_feature 1..20: note = CEP290-B1184/-1341 targeting domain (RNA)
  source 1..20: mol_type = other RNA
tcttatctaagatcctttca

SEQ ID NO: 893 - RNA, 20 nt, synthetic construct
  misc_feature 1..20: note = CEP290-B1185/-685 targeting domain (RNA)
  source 1..20: mol_type = other RNA
tcttccagttgttttgctca

SEQ ID NO: 894 - RNA, 20 nt, synthetic construct
  misc_feature 1..20: note = CEP290-B1186/-1618 targeting domain (RNA)
  source 1..20: mol_type = other RNA
tgagcaaaacaactggaaga

SEQ ID NO: 895 - RNA, 20 nt, synthetic construct
  misc_feature 1..20: note = CEP290-B1187/-667 targeting domain (RNA)
  source 1..20: mol_type = other RNA
tgagtatctcctgtttggca

SEQ ID NO: 896 - skipped

SEQ ID NO: 897 - RNA, 20 nt, synthetic construct
  misc_feature 1..20: note = CEP290-B1190/-1597 targeting domain (RNA)
  source 1..20: mol_type = other RNA
tgcctgaacaagttttgaaa

SEQ ID NO: 898 - RNA, 20 nt, synthetic construct
  misc_feature 1..20: note = CEP290-B1192/-1640 targeting domain (RNA)
  source 1..20: mol_type = other RNA
tgtaagactggagatagaga

SEQ ID NO: 899 - RNA, 20 nt, synthetic construct
  misc_feature 1..20: note = CEP290-B1193/-1014 targeting domain (RNA)
  source 1..20: mol_type = other RNA
tgtcctatcctctccagcat

SEQ ID NO: 900 - RNA, 20 nt, synthetic construct
  misc_feature 1..20: note = CEP290-B1194/-550 targeting domain (RNA)
  source 1..20: mol_type = other RNA
ttaacgttatcattttccca

SEQ ID NO: 901 - RNA, 20 nt, synthetic construct
  misc_feature 1..20: note = CEP290-B1195/-1627 targeting domain (RNA)
  source 1..20: mol_type = other RNA
ttacatatctgtcttcctta

SEQ ID NO: 902 - RNA, 20 nt, synthetic construct
  misc_feature 1..20: note = CEP290-B1196/-B1197/-1002 targeting domain (RNA)
  source 1..20: mol_type = other RNA
ttagatcttattctactcct

SEQ ID NO: 903 - skipped

SEQ ID NO: 904 - RNA, 20 nt, synthetic construct
  misc_feature 1..20: note = CEP290-B1198/-B1199/-535 targeting domain (RNA)
  source 1..20: mol_type = other RNA
ttcaggattcctactaaatt

SEQ ID NO: 905 - RNA, 20 nt, synthetic construct
  misc_feature 1..20: note = CEP290B1200/-1351 targeting domain (RNA)
  source 1..20: mol_type = other RNA
ttcatcttcctcatcagaaa

SEQ ID NO: 906 - RNA, 20 nt, synthetic construct
  misc_feature 1..20: note = CEP290-B1201/-1310 targeting domain (RNA)
  source 1..20: mol_type = other RNA
ttgcctaggactttctaatg

SEQ ID NO: 907 - RNA, 20 nt, synthetic construct
  misc_feature 1..20: note = CEP290-B1202/-B1203/-1322 targeting domain (RNA)
  source 1..20: mol_type = other RNA
tttctgctgcttttgccaaa

SEQ ID NO: 908 - skipped

SEQ ID NO: 909 - RNA, 20 nt, synthetic construct
  misc_feature 1..20: note = CEP290-B1205/-1568 targeting domain (RNA)
  source 1..20: mol_type = other RNA
tttttaaggcggggagtcac

SEQ ID NO: 910 - skipped

SEQ ID NO: 911 - RNA, 17 nt, synthetic construct
  misc_feature 1..17: note = CEP290-B1207 targeting domain (RNA)
  source 1..17: mol_type = other RNA
aaagaacatacataaga

SEQ ID NO: 912 - RNA, 17 nt, synthetic construct
  misc_feature 1..17: note = CEP290-B1208 targeting domain (RNA)
  source 1..17: mol_type = other RNA
aaatggttccctatata

SEQ ID NO: 913 - skipped

SEQ ID NO: 914 - RNA, 17 nt, synthetic construct
  misc_feature 1..17: note = CEP290-B1210 targeting domain (RNA)
  source 1..17: mol_type = other RNA
aacctatgtataagatg

SEQ ID NO: 915 - RNA, 17 nt, synthetic construct
  misc_feature 1..17: note = CEP290-B1211 targeting domain (RNA)
  source 1..17: mol_type = other RNA
aactaagacactgccaa

SEQ ID NO: 916 - RNA, 17 nt, synthetic construct
  misc_feature 1..17: note = CEP290-B1212 targeting domain (RNA)
  source 1..17: mol_type = other RNA
aagactggagatagaga

SEQ ID NO: 917 - RNA, 17 nt, synthetic construct
  misc_feature 1..17: note = CEP290-B1213 targeting domain (RNA)
  source 1..17: mol_type = other RNA
aagacttatattccatt

SEQ ID NO: 918 - RNA, 17 nt, synthetic construct
  misc_feature 1..17: note = CEP290-B1214 targeting domain (RNA)
  source 1..17: mol_type = other RNA
aagatgaaaaatactct

SEQ ID NO: 919 - skipped

SEQ ID NO: 920 - RNA, 17 nt, synthetic construct
  misc_feature 1..17: note = CEP290-B1216 targeting domain (RNA)
  source 1..17: mol_type = other RNA
aagcctctatttctgat

SEQ ID NO: 921 - skipped

SEQ ID NO: 922 - RNA, 17 nt, synthetic construct
  misc_feature 1..17: note = CEP290-1218 targeting domain (RNA)
  source 1..17: mol_type = other RNA
aagttttgaaacaggaa

SEQ ID NO: 923 - RNA, 17 nt, synthetic construct
  misc_feature 1..17: note = CEP290-B1219 targeting domain (RNA)
  source 1..17: mol_type = other RNA
acaagatgtctcttgcc

SEQ ID NO: 924 - skipped

SEQ ID NO: 925 - RNA, 17 nt, synthetic construct
  misc_feature 1..17: note = CEP290-B1221 targeting domain (RNA)
  source 1..17: mol_type = other RNA
acaggaatagaaattca

SEQ ID NO: 926 - RNA, 17 nt, synthetic construct
  misc_feature 1..17: note = CEP290-B1222 targeting domain (RNA)
  source 1..17: mol_type = other RNA
acatgggagtcacaggg

SEQ ID NO: 927 - RNA, 17 nt, synthetic construct
  misc_feature 1..17: note = CEP290-B1223 targeting domain (RNA)
  source 1..17: mol_type = other RNA
acgttatcattttccca

SEQ ID NO: 928 - RNA, 17 nt, synthetic construct
  misc_feature 1..17: note = CEP290-B1225 targeting domain (RNA)
  source 1..17: mol_type = other RNA
agaaagaacactgtggt

SEQ ID NO: 929-930 - skipped (2 entries)

SEQ ID NO: 931 - RNA, 17 nt, synthetic construct
  misc_feature 1..17: note = CEP290-B1229 targeting domain (RNA)
  source 1..17: mol_type = other RNA
agagttcaagctaatac

SEQ ID NO: 932 - RNA, 17 nt, synthetic construct
  misc_feature 1..17: note = CEP290-B1230 targeting domain (RNA)
  source 1..17: mol_type = other RNA
agatcctttcacaggag

SEQ ID NO: 933 - skipped

SEQ ID NO: 934 - RNA, 17 nt, synthetic construct
  misc_feature 1..17: note = CEP290-B1232 targeting domain (RNA)
  source 1..17: mol_type = other RNA
agatgacatgaggtaag

SEQ ID NO: 935 - RNA, 17 nt, synthetic construct
  misc_feature 1..17: note = CE290-B1233 targeting domain (RNA)
  source 1..17: mol_type = other RNA
agcaagagatgaactag

SEQ ID NO: 936-937 - skipped (2 entries)

SEQ ID NO: 938 - RNA, 17 nt, synthetic construct
  misc_feature 1..17: note = CEP290-B1236 targeting domain (RNA)
  source 1..17: mol_type = other RNA
aggactttctaatgctg

SEQ ID NO: 939 - RNA, 17 nt, synthetic construct
  misc_feature 1..17: note = CEP290-B1237 targeting domain (RNA)
  source 1..17: mol_type = other RNA
aggagatactcaacaca

SEQ ID NO: 940 - RNA, 17 nt, synthetic construct
  misc_feature 1..17: note = CEP290-B1238 targeting domain (RNA)
  source 1..17: mol_type = other RNA
aggataggacagaggac

SEQ ID NO: 941 - RNA, 17 nt, synthetic construct
  misc_feature 1..17: note = CEP290-B1239/-B1240 targeting domain (RNA)
  source 1..17: mol_type = other RNA
aggattcctactaaatt

SEQ ID NO: 942 - RNA, 17 nt, synthetic construct
  misc_feature 1..17: note = CEP290-B1241 targeting domain (RNA)
  source 1..17: mol_type = other RNA
agggtaggattcatgtt

SEQ ID NO: 943 - RNA, 17 nt, synthetic construct
  misc_feature 1..17: note = CEP290-B1242 targeting domain (RNA)
  source 1..17: mol_type = other RNA
agttcaagctaatacat

SEQ ID NO: 944 - RNA, 17 nt, synthetic construct
  misc_feature 1..17: note = CEP290-B1243 targeting domain (RNA)
  source 1..17: mol_type = other RNA
ataagcctctatttctg

SEQ ID NO: 945 - skipped

SEQ ID NO: 946 - RNA, 17 nt, synthetic construct
  misc_feature 1..17: note = CEP290-B1245/-B1246 targeting domain (RNA)
  source 1..17: mol_type = other RNA
ataatttagtaggaatc

SEQ ID NO: 947 - RNA, 17 nt, synthetic construct
  misc_feature 1..17: note = CEP290-B1247 targeting domain (RNA)
  source 1..17: mol_type = other RNA
ataccttttactgagga

SEQ ID NO: 948 - RNA, 17 nt, synthetic construct
  misc_feature 1..17: note = CEP290-B1248 targeting domain (RNA)
  source 1..17: mol_type = other RNA
atagaggcttatggatt

SEQ ID NO: 949 - RNA, 17 nt, synthetic construct
  misc_feature 1..17: note = CEP290-B1249 targeting domain (RNA)
  source 1..17: mol_type = other RNA
ataggacagaggacatg

SEQ ID NO: 950 - skipped

SEQ ID NO: 951 - RNA, 17 nt, synthetic construct
  misc_feature 1..17: note = CEP290-B1251 targeting domain (RNA)
  source 1..17: mol_type = other RNA
atcagaaatagaggctt

SEQ ID NO: 952 - RNA, 17 nt, synthetic construct
  misc_feature 1..17: note = CEP290-B1252 targeting domain (RNA)
  source 1..17: mol_type = other RNA
atcattcttgtggcagt

SEQ ID NO: 953 - RNA, 17 nt, synthetic construct
  misc_feature 1..17: note = CEP290-B1253 targeting domain (RNA)
  source 1..17: mol_type = other RNA
atcctccttactgccac

SEQ ID NO: 954 - skipped

SEQ ID NO: 955 - RNA, 17 nt, synthetic construct
  misc_feature 1..17: note = CEP290-B1255 targeting domain (RNA)
  source 1..17: mol_type = other RNA
atcttcctcatcagaaa

SEQ ID NO: 956 - skipped

SEQ ID NO: 957 - RNA, 17 nt, synthetic construct
  misc_feature 1..17: note = CEP290-B1260 targeting domain (RNA)
  source 1..17: mol_type = other RNA
attagaaagtcctaggc

SEQ ID NO: 958 - RNA, 17 nt, synthetic construct
  misc_feature 1..17: note = CEP290-B1261 targeting domain (RNA)
  source 1..17: mol_type = other RNA
attcttgtggcagtaag

SEQ ID NO: 959 - RNA, 17 nt, synthetic construct
  misc_feature 1..17: note = CEP290-B1262 targeting domain (RNA)
  source 1..17: mol_type = other RNA
cactctcatgtattagc

SEQ ID NO: 960 - RNA, 17 nt, synthetic construct
  misc_feature 1..17: note = CEP290-B1263 targeting domain (RNA)
  source 1..17: mol_type = other RNA
catatctgtcttcctta

SEQ ID NO: 961 - RNA, 17 nt, synthetic construct
  misc_feature 1..17: note = CEP290-B1264/-B1265 targeting domain
  source 1..17: mol_type = other RNA
catgactcataatttag

SEQ ID NO: 962 - RNA, 17 nt, synthetic construct
  misc_feature 1..17: note = CEP290-B1266 targeting domain
  source 1..17: mol_type = other RNA
catgagagtgattagtg

SEQ ID NO: 963 - RNA, 17 nt, synthetic construct
  misc_feature 1..17: note = CEP290-B1267 targeting domain
  source 1..17: mol_type = other RNA
cctaggactttctaatg

SEQ ID NO: 964 - RNA, 17 nt, synthetic construct
  misc_feature 1..17: note = CEP290-B1268 trgeting domain
  source 1..17: mol_type = other RNA
cctatcctctccagcat

SEQ ID NO: 965 - skipped

SEQ ID NO: 966 - RNA, 17 nt, synthetic construct
  misc_feature 1..17: note = CEP290-B1270 targeting domain
  source 1..17: mol_type = other RNA
ctcatgtcatctagagc

SEQ ID NO: 967 - RNA, 17 nt, synthetic construct
  misc_feature 1..17: note = CEP290-B1271 targeting domain
  source 1..17: mol_type = other RNA
ctcttgctctagatgac

SEQ ID NO: 968 - RNA, 17 nt, synthetic construct
  misc_feature 1..17: note = CEP290-B1272/-B1273 targeting domain (RNA)
  source 1..17: mol_type = other RNA
ctctttggcaaaagcag

SEQ ID NO: 969 - skipped

SEQ ID NO: 970 - RNA, 17 nt, synthetic construct
  misc_feature 1..17: note = CEP290-B1274 targeting domain (RNA)
  source 1..17: mol_type = other RNA
ctgaacaagttttgaaa

SEQ ID NO: 971 - RNA, 17 nt, synthetic construct
  misc_feature 1..17: note = CEP290-B1275 targeting domain (RNA)
  source 1..17: mol_type = other RNA
ctgagcaaaacaactgg

SEQ ID NO: 972 - RNA, 17 nt, synthetic construct
  misc_feature 1..17: note = CEP290-B1276/-B1277 targeting domain (RNA)
  source 1..17: mol_type = other RNA
ctgctgcttttgccaaa

SEQ ID NO: 973 - RNA, 17 nt, synthetic construct
  misc_feature 1..17: note = CEP290-B1278 targeting domain
  source 1..17: mol_type = other RNA
ctggagaggataggaca

SEQ ID NO: 974 - RNA, 17 nt, synthetic construct
  misc_feature 1..17: note = CEP290-B1279/-B1280 targeting domain (RNA)
  source 1..17: mol_type = other RNA
taaatgaaaacgttgtt

SEQ ID NO: 975 - RNA, 17 nt, synthetic construct
  misc_feature 1..17: note = CEP290-B1281 targeting domain (RNA)
  source 1..17: mol_type = other RNA
taagcatacttttttta

SEQ ID NO: 976 - RNA, 17 nt, synthetic construct
  misc_feature 1..17: note = CEP290-B1283 targeting domain (RNA)
  source 1..17: mol_type = other RNA
taatgcctgaacaagtt

SEQ ID NO: 977 - RNA, 17 nt, synthetic construct
  misc_feature 1..17: note = CEP290-B1284 targeting domain (RNA)
  source 1..17: mol_type = other RNA
taatttgtttctgtgtg

SEQ ID NO: 978 - RNA, 17 nt, synthetic construct
  misc_feature 1..17: note = CEP290-B1285 targeting domain (RNA)
  source 1..17: mol_type = other RNA
tacaaaagaacatacat

SEQ ID NO: 979 - RNA, 17 nt, synthetic construct
  misc_feature 1..17: note = CEP290-B1286 targeting domain (RNA)
  source 1..17: mol_type = other RNA
taggcaagagacatctt

SEQ ID NO: 980 - RNA, 17 nt, synthetic construct
  misc_feature 1..17: note = CEP290-B1287 targeting domain (RNA)
  source 1..17: mol_type = other RNA
tataagtcttttgatat

SEQ ID NO: 981 - RNA, 17 nt, synthetic construct
  misc_feature 1..17: note = CEP290-B1288 targeting domain (RNA)
  source 1..17: mol_type = other RNA
tatctaagatcctttca

SEQ ID NO: 982 - RNA, 17 nt, synthetic construct
  misc_feature 1..17: note = CEP290-B1289 targeting domain (RNA)
  source 1..17: mol_type = other RNA
tatttctgatgaggaag

SEQ ID NO: 983 - RNA, 17 nt, synthetic construct
  misc_feature 1..17: note = CEP290-B1292 targeting domain (RNA)
  source 1..17: mol_type = other RNA
tccagttgttttgctca

SEQ ID NO: 984 - RNA, 17 nt, synthetic construct
  misc_feature 1..17: note = CEP290-B1293 targeting domain (RNA)
  source 1..17: mol_type = other RNA
tctaatgctggagagga

SEQ ID NO: 985-986 - skipped (2 entries)

SEQ ID NO: 987 - RNA, 17 nt, synthetic construct
  misc_feature 1..17: note = CEP290-B1298 targeting domain (RNA)
  source 1..17: mol_type = other RNA
tgcagaactagtgtaga

SEQ ID NO: 988 - skipped

SEQ ID NO: 989 - RNA, 17 nt, synthetic construct
  misc_feature 1..17: note = CEP290-B1301 targeting domain (RNA)
  source 1..17: mol_type = other RNA
tgctggagaggatagga

SEQ ID NO: 990 - RNA, 17 nt, synthetic construct
  misc_feature 1..17: note = CEP290-B1303/-B1304 targeting domain (RNA)
  source 1..17: mol_type = other RNA
tgtttatcaatattatt

SEQ ID NO: 991 - RNA, 17 nt, synthetic construct
  misc_feature 1..17: note = CEP290-B1305 targeting domain (RNA)
  source 1..17: mol_type = other RNA
ttaaaaaaagtatgctt

SEQ ID NO: 992 - RNA, 17 nt, synthetic construct
  misc_feature 1..17: note = CEP290-B1306 targeting domain (RNA)
  source 1..17: mol_type = other RNA
ttaaggcggggagtcac

SEQ ID NO: 993 - RNA, 17 nt, synthetic construct
  misc_feature 1..17: note = CEP290-B1307/-B1308 targeting domain (RNA)
  source 1..17: mol_type = other RNA
ttactgaatgtgtctct

SEQ ID NO: 994 - skipped

SEQ ID NO: 995 - RNA, 17 nt, synthetic construct
  misc_feature 1..17: note = CEP290-B1310 targeting domain (RNA)
  source 1..17: mol_type = other RNA
ttcactgagcaaaacaa

SEQ ID NO: 996 - RNA, 17 nt, synthetic construct
  misc_feature 1..17: note = CEP290-B1311/-B1312 targeting domain (RNA)
  source 1..17: mol_type = other RNA
ttctgctgcttttgcca

SEQ ID NO: 997 - RNA, 17 nt, synthetic construct
  misc_feature 1..17: note = CEP290-B1313 targeting domain (RNA)
  source 1..17: mol_type = other RNA
ttgaactctgtgccaaa

SEQ ID NO: 998 - skipped

SEQ ID NO: 999 - RNA, 17 nt, synthetic construct
  misc_feature 1..17: note = CEP290-B1315 targeting domain (RNA)
  source 1..17: mol_type = other RNA
ttgtggataatgtatca

SEQ ID NO: 1000 - RNA, 17 nt, synthetic construct
  misc_feature 1..17: note = CEP290-B1316 targeting domain (RNA)
  source 1..17: mol_type = other RNA
ttgttcatcttcctcat

SEQ ID NO: 1001-1002 - skipped (2 entries)

SEQ ID NO: 1003 - RNA, 17 nt, synthetic construct
  misc_feature 1..17: note = CEP290-B1319 targeting domain (RNA)
  source 1..17: mol_type = other RNA
ttttgacagtttttaag

SEQ ID NO: 1004 - RNA, 17 nt, synthetic construct
  misc_feature 1..17: note = CEP290-B235/-1967 targeting domain (RNA)
  source 1..17: mol_type = other RNA
ttcaagctaatacatga

SEQ ID NO: 1005 - RNA, 17 nt, synthetic construct
  misc_feature 1..17: note = CEP290-B109/-1963 targeting domain (RNA)
  source 1..17: mol_type = other RNA
cacatgggagtcacagg

SEQ ID NO: 1006 - RNA, 20 nt, synthetic construct
  misc_feature 1..20: note = CEP290-B129/-1960 targeting domain (RNA)
  source 1..20: mol_type = other RNA
agtcacatgggagtcacagg

SEQ ID NO: 1007 - RNA, 17 nt, synthetic construct
  misc_feature 1..17: note = CEP290-B295/-1939 targeting domain (RNA)
  source 1..17: mol_type = other RNA
aatagaggcttatggat

SEQ ID NO: 1008 - RNA, 17 nt, synthetic construct
  misc_feature 1..17: note = CEP290-B297/-1950 targeting domain (RNA)
  source 1..17: mol_type = other RNA
ctgaggacagaacaagc

SEQ ID NO: 1009 - RNA, 17 nt, synthetic construct
  misc_feature 1..17: note = CEP290-B298/-1948 targeting domain (RNA)
  source 1..17: mol_type = other RNA
catcagaaatagaggct

SEQ ID NO: 1010 - skipped

SEQ ID NO: 1011 - RNA, 17 nt, synthetic construct
  misc_feature 1..17: note = CEP290-B300/-B522/-1942 targeting domain (RNA)
  source 1..17: mol_type = other RNA
agcagaaagcaaactga

SEQ ID NO: 1012 - RNA, 17 nt, synthetic construct
  misc_feature 1..17: note = CEP290-B301/-B537/-1937 targeting domain (RNA)
  source 1..17: mol_type = other RNA
aaaagcagcagaaagca

SEQ ID NO: 1013 - RNA, 20 nt, synthetic construct
  misc_feature 1..20: note = CEP290-B302/-1956 targeting domain (RNA)
  source 1..20: mol_type = other RNA
ttactgaggacagaacaagc

SEQ ID NO: 1014 - RNA, 20 nt, synthetic construct
  misc_feature 1..20: note = CEP290-B303/-B504/-1938 targeting domain (RNA)
  source 1..20: mol_type = other RNA
aacgttgttctgagtagctt

SEQ ID NO: 1015 - skipped

SEQ ID NO: 1016 - RNA, 20 nt, synthetic construct
  misc_feature 1..20: note = CEP290-B305/-1941 targeting domain (RNA)
  source 1..20: mol_type = other RNA
agaaatagaggcttatggat

SEQ ID NO: 1017 - RNA, 20 nt, synthetic construct
  misc_feature 1..20: note = CEP290-B306/-1949 targeting domain (RNA)
  source 1..20: mol_type = other RNA
cctcatcagaaatagaggct

SEQ ID NO: 1018 - RNA, 20 nt, synthetic construct
  misc_feature 1..20: note = CEP290-B307/-B526/-1943 targeting domain (RNA)
  source 1..20: mol_type = other RNA
agcagcagaaagcaaactga

SEQ ID NO: 1019-1024 - skipped (6 entries)

SEQ ID NO: 1025 - RNA, 24 nt, synthetic construct
  misc_feature 1..24: note = CEP290-35/-616 targeting domain (RNA)
  source 1..24: mol_type = other RNA
aaataaaactaagacactgccaat

SEQ ID NO: 1026 - RNA, 23 nt, synthetic construct
  misc_feature 1..23: note = CEP290-36/-617 targeting domain (RNA)
  source 1..23: mol_type = other RNA
aataaaactaagacactgccaat

SEQ ID NO: 1027 - RNA, 22 nt, synthetic construct
  misc_feature 1..22: note = CEP290-37/-618 targeting domain (RNA)
  source 1..22: mol_type = other RNA
ataaaactaagacactgccaat

SEQ ID NO: 1028 - RNA, 19 nt, synthetic construct
  misc_feature 1..19: note = CEP290-39/-620 targeting domain (RNA)
  source 1..19: mol_type = other RNA
aaactaagacactgccaat

SEQ ID NO: 1029 - RNA, 18 nt, synthetic construct
  misc_feature 1..18: note = CEP290-40/-621 targeting domain (RNA)
  source 1..18: mol_type = other RNA
aactaagacactgccaat

SEQ ID NO: 1030 - RNA, 24 nt, synthetic construct
  misc_feature 1..24: note = CEP290-17 targeting domain (RNA)
  source 1..24: mol_type = other RNA
ccgcacctggccccagttgtaatt

SEQ ID NO: 1031 - RNA, 23 nt, synthetic construct
  misc_feature 1..23: note = CEP290-41 targeting domain (RNA)
  source 1..23: mol_type = other RNA
cgcacctggccccagttgtaatt

SEQ ID NO: 1032 - RNA, 21 nt, synthetic construct
  misc_feature 1..21: note = CEP290-42 targeting domain (RNA)
  source 1..21: mol_type = other RNA
cacctggccccagttgtaatt

SEQ ID NO: 1033 - RNA, 19 nt, synthetic construct
  misc_feature 1..19: note = CEP290-513 targeting domain (RNA)
  source 1..19: mol_type = other RNA
cctggccccagttgtaatt

SEQ ID NO: 1034 - RNA, 18 nt, synthetic construct
  misc_feature 1..18: note = CEP290-514 targeting domain (RNA)
  source 1..18: mol_type = other RNA
ctggccccagttgtaatt

SEQ ID NO: 1035 - RNA, 21 nt, synthetic construct
  misc_feature 1..21: note = CEP290-43/-693 targeting domain (RNA)
  source 1..21: mol_type = other RNA
taaaactaagacactgccaat

SEQ ID NO: 1036 - RNA, 24 nt, synthetic construct
  misc_feature 1..24: note = CEP290-44/-1448 targeting domain (RNA)
  source 1..24: mol_type = other RNA
aaaataaaactaagacactgccaa

SEQ ID NO: 1037 - RNA, 23 nt, synthetic construct
  misc_feature 1..23: note = CEP290-45/-1449 targeting domain (RNA)
  source 1..23: mol_type = other RNA
aaataaaactaagacactgccaa

SEQ ID NO: 1038 - RNA, 22 nt, synthetic construct
  misc_feature 1..22: note = CEP290-46/-1450 targeting domain (RNA)
  source 1..22: mol_type = other RNA
aataaaactaagacactgccaa

SEQ ID NO: 1039 - RNA, 21 nt, synthetic construct
  misc_feature 1..21: note = CEP290-47/-1451 targeting domain (RNA)
  source 1..21: mol_type = other RNA
ataaaactaagacactgccaa

SEQ ID NO: 1040 - RNA, 19 nt, synthetic construct
  misc_feature 1..19: note = CEP290-48/-1452 targeting domain (RNA)
  source 1..19: mol_type = other RNA
aaaactaagacactgccaa

SEQ ID NO: 1041 - RNA, 18 nt, synthetic construct
  misc_feature 1..18: note = CEP290-49/-1453 targeting domain (RNA)
  source 1..18: mol_type = other RNA
aaactaagacactgccaa

SEQ ID NO: 1042 - RNA, 24 nt, synthetic construct
  misc_feature 1..24: note = CEP290-16 targeting domain (RNA)
  source 1..24: mol_type = other RNA
aagacactgccaatagggataggt

SEQ ID NO: 1043 - RNA, 23 nt, synthetic construct
  misc_feature 1..23: note = CEP290-50/-1366 targeting domain (RNA)
  source 1..23: mol_type = other RNA
agacactgccaatagggataggt

SEQ ID NO: 1044 - RNA, 21 nt, synthetic construct
  misc_feature 1..21: note = CEP290-51/-1367 targeting domain (RNA)
  source 1..21: mol_type = other RNA
acactgccaatagggataggt

SEQ ID NO: 1045 - RNA, 19 nt, synthetic construct
  misc_feature 1..19: note = CEP290-510 targeting domain (RNA)
  source 1..19: mol_type = other RNA
actgccaatagggataggt

SEQ ID NO: 1046 - RNA, 18 nt, synthetic construct
  misc_feature 1..18: note = CEP290-511 targeting domain (RNA)
  source 1..18: mol_type = other RNA
ctgccaatagggataggt

SEQ ID NO: 1047 - RNA, 22 nt, synthetic construct
  misc_feature 1..22: note = CEP290-11 targeting domain (RNA)
  source 1..22: mol_type = other RNA
gacactgccaatagggataggt

SEQ ID NO: 1048 - skipped

SEQ ID NO: 1049 - RNA, 22 nt, synthetic construct
  misc_feature 1..22: note = CEP290-13 targeting domain (RNA)
  source 1..22: mol_type = other RNA
atgagatactcacaattacaac

SEQ ID NO: 1050 - RNA, 19 nt, synthetic construct
  misc_feature 1..19: note = CEP290-53 targeting domain (RNA)
  source 1..19: mol_type = other RNA
agatactcacaattacaac

SEQ ID NO: 1051 - RNA, 24 nt, synthetic construct
  misc_feature 1..24: note = CEP290-18 targeting sequence (RNA)
  source 1..24: mol_type = other RNA
gtatgagatactcacaattacaac

SEQ ID NO: 1052 - RNA, 18 nt, synthetic construct
  misc_feature 1..18: note = CEP290-55 targeting domain (RNA)
  source 1..18: mol_type = other RNA
gatactcacaattacaac

SEQ ID NO: 1053 - RNA, 23 nt, synthetic construct
  misc_feature 1..23: note = CEP290-14 targeting domain (RNA)
  source 1..23: mol_type = other RNA
tatgagatactcacaattacaac

SEQ ID NO: 1054 - RNA, 21 nt, synthetic construct
  misc_feature 1..21: note = CEP290-57 targeting domain (RNA)
  source 1..21: mol_type = other RNA
tgagatactcacaattacaac

SEQ ID NO: 1055 - RNA, 21 nt, synthetic construct
  misc_feature 1..21: note = CEP290-58 targeting domain (RNA)
  source 1..21: mol_type = other RNA
atgagatattcacaattacaa

SEQ ID NO: 1056 - RNA, 18 nt, synthetic construct
  misc_feature 1..18: note = CEP290-59 targeting domain (RNA)
  source 1..18: mol_type = other RNA
agatattcacaattacaa

SEQ ID NO: 1057 - RNA, 24 nt, synthetic construct
  misc_feature 1..24: note = CEP290-19 targeting domain (RNA)
  source 1..24: mol_type = other RNA
ggtatgagatattcacaattacaa

SEQ ID NO: 1058 - RNA, 23 nt, synthetic construct
  misc_feature 1..23: note = CEP290-61 targeting domain (RNA)
  source 1..23: mol_type = other RNA
gtatgagatattcacaattacaa

SEQ ID NO: 1059 - RNA, 19 nt, synthetic construct
  misc_feature 1..19: note = CEP290-63 targeting domain (RNA)
  source 1..19: mol_type = other RNA
gagatattcacaattacaa

SEQ ID NO: 1060 - RNA, 22 nt, synthetic construct
  misc_feature 1..22: note = CEP290-65 targeting domain (RNA)
  source 1..22: mol_type = other RNA
tatgagatattcacaattacaa

SEQ ID NO: 1061 - RNA, 20 nt, synthetic construct
  misc_feature 1..20: note = CEP290-66 targeting domain (RNA)
  source 1..20: mol_type = other RNA
tgagatattcacaattacaa

SEQ ID NO: 1062 - RNA, 17 nt, synthetic construct
  misc_feature 1..17: note = CEP290-121 targeting domain (RNA)
  source 1..17: mol_type = other RNA
aaaaaggagcatgaaac

SEQ ID NO: 1063-1065 - skipped (3 entries)

SEQ ID NO: 1066 - RNA, 20 nt, synthetic construct
  misc_feature 1..20: note = CEP290-129 targeting domain (RNA)
  source 1..20: mol_type = other RNA
aaagaaatagatgtagattg

SEQ ID NO: 1067-1069 - skipped (3 entries)

SEQ ID NO: 1070 - RNA, 17 nt, synthetic construct
  misc_feature 1..17: note = CEP290-135 targeting domain (RNA)
  source 1..17: mol_type = other RNA
aacaaactattctccca

SEQ ID NO: 1071 - RNA, 20 nt, synthetic construct
  misc_feature 1..20: note = CEP290-136 targeting domain (RNA)
  source 1..20: mol_type = other RNA
aacagtagctgaaatattaa

SEQ ID NO: 1072 - skipped

SEQ ID NO: 1073 - RNA, 20 nt, synthetic construct
  misc_feature 1..20: note = CEP290-138 targeting domain (RNA)
  source 1..20: mol_type = other RNA
aactattctcccatggtccc

SEQ ID NO: 1074 - RNA, 20 nt, synthetic construct
  misc_feature 1..20: note = CEP290-141 targeting domain (RNA)
  source 1..20: mol_type = other RNA
aaggaaatacaaaaactgga

SEQ ID NO: 1075 - RNA, 17 nt, synthetic construct
  misc_feature 1..17: note = CEP290-142 targeting domain (RNA)
  source 1..17: mol_type = other RNA
aaggtatagagttcaag

SEQ ID NO: 1076 - RNA, 17 nt, synthetic construct
  misc_feature 1..17: note = CEP290-143 targeting domain (RNA)
  source 1..17: mol_type = other RNA
aaggttcatgagactag

SEQ ID NO: 1077 - RNA, 20 nt, synthetic construct
  misc_feature 1..20: note = CEP290-144 targeting domain (RNA)
  source 1..20: mol_type = other RNA
aatagtttgttctgggtaca

SEQ ID NO: 1078 - skipped

SEQ ID NO: 1079 - RNA, 20 nt, synthetic construct
  misc_feature 1..20: note = CEP290-146 targeting domain (RNA)
  source 1..20: mol_type = other RNA
aatatattatctatttatag

SEQ ID NO: 1080 - RNA, 17 nt, synthetic construct
  misc_feature 1..17: note = CEP290-147 targeting domain (RNA)
  source 1..17: mol_type = other RNA
aatattgtaatcaaagg

SEQ ID NO: 1081 - RNA, 17 nt, synthetic construct
  misc_feature 1..17: note = CEP290-148 targeting domain (RNA)
  source 1..17: mol_type = other RNA
aatatttcagctactgt

SEQ ID NO: 1082 - RNA, 20 nt, synthetic construct
  misc_feature 1..20: note = CEP290-149 targeting domain (RNA)
  source 1..20: mol_type = other RNA
aattattgttgctttttgag

SEQ ID NO: 1083 - skipped

SEQ ID NO: 1084 - RNA, 17 nt, synthetic construct
  misc_feature 1..17: note = CEP290-151 targeting domain (RNA)
  source 1..17: mol_type = other RNA
acaaaagccagggacca

SEQ ID NO: 1085 - RNA, 20 nt, synthetic construct
  misc_feature 1..20: note = CEP290-153/-1200 targeting domain (RNA)
  source 1..20: mol_type = other RNA
acagagtgcatccatggtcc

SEQ ID NO: 1086 - skipped

SEQ ID NO: 1087 - RNA, 20 nt, synthetic construct
  misc_feature 1..20: note = CEP290-155/-1080 targeting domain (RNA)
  source 1..20: mol_type = other RNA
accagacatctaagagaaaa

SEQ ID NO: 1088 - skipped

SEQ ID NO: 1089 - RNA, 20 nt, synthetic construct
  misc_feature 1..20: note = CEP290-159/-1228 targeting domain (RNA)
  source 1..20: mol_type = other RNA
agaatattgtaatcaaagga

SEQ ID NO: 1090 - RNA, 17 nt, synthetic construct
  misc_feature 1..17: note = CEP290-160 targeting domain (RNA)
  source 1..17: mol_type = other RNA
agacatctaagagaaaa

SEQ ID NO: 1091-1092 - skipped (2 entries)

SEQ ID NO: 1093 - RNA, 17 nt, synthetic construct
  misc_feature 1..17: note = CEP290-164 targeting domain (RNA)
  source 1..17: mol_type = other RNA
agatgtctggttaaaag

SEQ ID NO: 1094-1095 - skipped (2 entries)

SEQ ID NO: 1096 - RNA, 20 nt, synthetic construct
  misc_feature 1..20: note = CEP290-168 targeting domain (RNA)
  source 1..20: mol_type = other RNA
aggaaatacaaaaactggat

SEQ ID NO: 1097-1100 - skipped (4 entries)

SEQ ID NO: 1101 - RNA, 20 nt, synthetic construct
  misc_feature 1..20: note = CEP290-173/-1238 targeting domain (RNA)
  source 1..20: mol_type = other RNA
aggtagaatattgtaatcaa

SEQ ID NO: 1102 - RNA, 17 nt, synthetic construct
  misc_feature 1..17: note = CEP290-174 targeting domain (RNA)
  source 1..17: mol_type = other RNA
agtagctgaaatattaa

SEQ ID NO: 1103 - RNA, 17 nt, synthetic construct
  misc_feature 1..17: note = CEP290-177 targeting domain (RNA)
  source 1..17: mol_type = other RNA
agtttgttctgggtaca

SEQ ID NO: 1104-1106 - skipped (3 entries)

SEQ ID NO: 1107 - RNA, 20 nt, synthetic construct
  misc_feature 1..20: note = CEP290-181 targeting domain (RNA)
  source 1..20: mol_type = other RNA
atagtttgttctgggtacag

SEQ ID NO: 1108 - skipped

SEQ ID NO: 1109 - RNA, 17 nt, synthetic construct
  misc_feature 1..17: note = CEP290-183 targeting domain (RNA)
  source 1..17: mol_type = other RNA
atattaagggctcttcc

SEQ ID NO: 1110 - RNA, 17 nt, synthetic construct
  misc_feature 1..17: note = CEP290-184 targeting domain (RNA)
  source 1..17: mol_type = other RNA
atattgtaatcaaagga

SEQ ID NO: 1111 - RNA, 17 nt, synthetic construct
  misc_feature 1..17: note = CEP290-185 targeting domain (RNA)
  source 1..17: mol_type = other RNA
atcatgcaagtgaccta

SEQ ID NO: 1112-1115 - skipped (4 entries)

SEQ ID NO: 1116 - RNA, 20 nt, synthetic construct
  misc_feature 1..20: note = CEP290-192 targeting domain (RNA)
  source 1..20: mol_type = other RNA
atgggagaatagtttgttct

SEQ ID NO: 1117 - skipped

SEQ ID NO: 1118 - RNA, 20 nt, synthetic construct
  misc_feature 1..20: note = CEP290-195 targeting domain (RNA)
  source 1..20: mol_type = other RNA
attccaaggaacaaaagcca

SEQ ID NO: 1119 - RNA, 20 nt, synthetic construct
  misc_feature 1..20: note = CEP290-196 targeting domain (RNA)
  source 1..20: mol_type = other RNA
attgaggtagaatcaagaag

SEQ ID NO: 1120 - RNA, 17 nt, synthetic construct
  misc_feature 1..17: note = CEP290-198 targeting domain (RNA)
  source 1..17: mol_type = other RNA
caaaagccagggaccat

SEQ ID NO: 1121 - RNA, 20 nt, synthetic construct
  misc_feature 1..20: note = CEP290-199 targeting domain (RNA)
  source 1..20: mol_type = other RNA
caacagtagctgaaatatta

SEQ ID NO: 1122 - skipped

SEQ ID NO: 1123 - RNA, 20 nt, synthetic construct
  misc_feature 1..20: note = CEP290-201 targeting domain (RNA)
  source 1..20: mol_type = other RNA
cagaacaaactattctccca

SEQ ID NO: 1124 - RNA, 20 nt, synthetic construct
  misc_feature 1..20: note = CEP290-202/-650 targeting domain (RNA)
  source 1..20: mol_type = other RNA
cagatttcatgtgtgaagaa

SEQ ID NO: 1125 - skipped

SEQ ID NO: 1126 - RNA, 20 nt, synthetic construct
  misc_feature 1..20: note = CEP290-205 targeting domain (RNA)
  source 1..20: mol_type = other RNA
caggggtaagagaaagggat

SEQ ID NO: 1127 - skipped

SEQ ID NO: 1128 - RNA, 17 nt, synthetic construct
  misc_feature 1..17: note = CEP290-207 targeting domain (RNA)
  source 1..17: mol_type = other RNA
cagtagctgaaatatta

SEQ ID NO: 1129 - skipped

SEQ ID NO: 1130 - RNA, 20 nt, synthetic construct
  misc_feature 1..20: note = CEP290-209 targeting domain (RNA)
  source 1..20: mol_type = other RNA
catgggagaatagtttgttc

SEQ ID NO: 1131 - RNA, 20 nt, synthetic construct
  misc_feature 1..20: note = CEP290-211/-1104 targeting domain (RNA)
  source 1..20: mol_type = other RNA
cattccaaggaacaaaagcc

SEQ ID NO: 1132-1139 - skipped (8 entries)

SEQ ID NO: 1140 - RNA, 20 nt, synthetic construct
  misc_feature 1..20: note = CEP290-226 targeting domain (RNA)
  source 1..20: mol_type = other RNA
ctggcttttgttccttggaa

SEQ ID NO: 1141 - RNA, 17 nt, synthetic construct
  misc_feature 1..17: note = CEP290-227 targeting domain (RNA)
  source 1..17: mol_type = other RNA
ctgtaagataactacaa

SEQ ID NO: 1142 - skipped

SEQ ID NO: 1143 - RNA, 20 nt, synthetic construct
  misc_feature 1..20: note = CEP290-229 targeting domain (RNA)
  source 1..20: mol_type = other RNA
cttaatatttcagctactgt

SEQ ID NO: 1144 - RNA, 20 nt, synthetic construct
  misc_feature 1..20: note = CEP290-231 targeting domain (RNA)
  source 1..20: mol_type = other RNA
cttagatgtctggttaaaag

SEQ ID NO: 1145-1147 - skipped (3 entries)

SEQ ID NO: 1148 - RNA, 17 nt, synthetic construct
  misc_feature 1..17: note = CEP290-236 targeting domain (RNA)
  source 1..17: mol_type = other RNA
gaaatacaaaaactgga

SEQ ID NO: 1149 - RNA, 20 nt, synthetic construct
  misc_feature 1..20: note = CEP290-239 targeting domain (RNA)
  source 1..20: mol_type = other RNA
ggagtgcagtggagtgatct

SEQ ID NO: 1150 - RNA, 17 nt, synthetic construct
  misc_feature 1..17: note = CEP290-240 targeting domain (RNA)
  source 1..17: mol_type = other RNA
ggggtaagagaaaggga

SEQ ID NO: 1151 - RNA, 17 nt, synthetic construct
  misc_feature 1..17: note = CEP290-241 targeting domain (RNA)
  source 1..17: mol_type = other RNA
gggtaagagaaagggat

SEQ ID NO: 1152 - RNA, 17 nt, synthetic construct
  misc_feature 1..17: note = CEP290-242 targeting domain (RNA)
  source 1..17: mol_type = other RNA
gtctcactgtgttgccc

SEQ ID NO: 1153 - RNA, 17 nt, synthetic construct
  misc_feature 1..17: note = CEP290-243 targeting domain (RNA)
  source 1..17: mol_type = other RNA
gtgcagtggagtgatct

SEQ ID NO: 1154 - RNA, 20 nt, synthetic construct
  misc_feature 1..20: note = CEP290-244/-973 targeting domain (RNA)
  source 1..20: mol_type = other RNA
gtgtgtgtgtgtgtgttatg

SEQ ID NO: 1155 - RNA, 17 nt, synthetic construct
  misc_feature 1..17: note = CEP290-245 targeting domain (RNA)
  source 1..17: mol_type = other RNA
gtgtgtgtgtgttatgt

SEQ ID NO: 1156 - RNA, 17 nt, synthetic construct
  misc_feature 1..17: note = CEP290-246 targeting domain (RNA)
  source 1..17: mol_type = other RNA
aaatacaaaaactggat

SEQ ID NO: 1157-1159 - skipped (3 entries)

SEQ ID NO: 1160 - RNA, 20 nt, synthetic construct
  misc_feature 1..20: note = CEP290-251 targeting domain (RNA)
  source 1..20: mol_type = other RNA
acaggggtaagagaaaggga

SEQ ID NO: 1161 - RNA, 20 nt, synthetic construct
  misc_feature 1..20: note = CEP290-254 targeting domain (RNA)
  source 1..20: mol_type = other RNA
actccactgcactccagcct

SEQ ID NO: 1162 - skipped

SEQ ID NO: 1163 - RNA, 20 nt, synthetic construct
  misc_feature 1..20: note = CEP290-256 targeting domain (RNA)
  source 1..20: mol_type = other RNA
agagtctcactgtgttgccc

SEQ ID NO: 1164 - skipped

SEQ ID NO: 1165 - RNA, 17 nt, synthetic construct
  misc_feature 1..17: note = CEP290-258 targeting domain (RNA)
  source 1..17: mol_type = other RNA
atattatctatttatag

SEQ ID NO: 1166 - RNA, 17 nt, synthetic construct
  misc_feature 1..17: note = CEP290-259 targeting domain (RNA)
  source 1..17: mol_type = other RNA
atttcatgtgtgaagaa

SEQ ID NO: 1167-1168 - skipped (2 entries)

SEQ ID NO: 1169 - RNA, 20 nt, synthetic construct
  misc_feature 1..20: note = CEP290-262 targeting domain (RNA)
  source 1..20: mol_type = other RNA
cactccactgcactccagcc

SEQ ID NO: 1170 - RNA, 17 nt, synthetic construct
  misc_feature 1..17: note = CEP290-263 targeting domain (RNA)
  source 1..17: mol_type = other RNA
cactgtgttgcccaggc

SEQ ID NO: 1171 - RNA, 17 nt, synthetic construct
  misc_feature 1..17: note = CEP290-264 targeting domain (RNA)
  source 1..17: mol_type = other RNA
ccaaggaacaaaagcca

SEQ ID NO: 1172 - RNA, 17 nt, synthetic construct
  misc_feature 1..17: note = CEP290-265 targeting domain (RNA)
  source 1..17: mol_type = other RNA
ccactgcactccagcct

SEQ ID NO: 1173 - RNA, 17 nt, synthetic construct
  misc_feature 1..17: note = CEP290-266 targeting domain (RNA)
  source 1..17: mol_type = other RNA
cccaggctggagtgcag

SEQ ID NO: 1174 - RNA, 17 nt, synthetic construct
  misc_feature 1..17: note = CEP290-267 targeting domain (RNA)
  source 1..17: mol_type = other RNA
ccctggcttttgttcct

SEQ ID NO: 1175 - RNA, 20 nt, synthetic construct
  misc_feature 1..20: note = CEP290-268 targeting domain (RNA)
  source 1..20: mol_type = other RNA
cgcttgaacctgggaggcag

SEQ ID NO: 1176 - RNA, 17 nt, synthetic construct
  misc_feature 1..17: note = CEP290-269 targeting domain (RNA)
  source 1..17: mol_type = other RNA
taaggaaatacaaaaac

SEQ ID NO: 1177 - RNA, 20 nt, synthetic construct
  misc_feature 1..20: note = CEP290-270 targeting domain (RNA)
  source 1..20: mol_type = other RNA
taataaggaaatacaaaaac

SEQ ID NO: 1178 - RNA, 20 nt, synthetic construct
  misc_feature 1..20: note = CEP290-271 targeting domain (RNA)
  source 1..20: mol_type = other RNA
tactgcaacctctgcctccc

SEQ ID NO: 1179-1180 - skipped (2 entries)

SEQ ID NO: 1181 - RNA, 17 nt, synthetic construct
  misc_feature 1..17: note = CEP290-274 targeting domain (RNA)
  source 1..17: mol_type = other RNA
tccactgcactccagcc

SEQ ID NO: 1182 - RNA, 20 nt, synthetic construct
  misc_feature 1..20: note = CEP290-275/-784 targeting domain (RNA)
  source 1..20: mol_type = other RNA
tctcactgtgttgcccaggc

SEQ ID NO: 1183 - skipped

SEQ ID NO: 1184 - RNA, 17 nt, synthetic construct
  misc_feature 1..17: note = CEP290-277 targeting domain (RNA)
  source 1..17: mol_type = other RNA
tgcaacctctgcctccc

SEQ ID NO: 1185 - RNA, 20 nt, synthetic construct
  misc_feature 1..20: note = CEP290-278/-1197 targeting domain (RNA)
  source 1..20: mol_type = other RNA
tgtgtgtgtgtgtgttatgt

SEQ ID NO: 1186 - RNA, 17 nt, synthetic construct
  misc_feature 1..17: note = CEP290-279 targeting domain (RNA)
  source 1..17: mol_type = other RNA
tgtgtgtgtgtgttatg

SEQ ID NO: 1187 - skipped

SEQ ID NO: 1188 - RNA, 17 nt, synthetic construct
  misc_feature 1..17: note = CEP290-281 targeting domain (RNA)
  source 1..17: mol_type = other RNA
ttgaacctgggaggcag

SEQ ID NO: 1189 - RNA, 20 nt, synthetic construct
  misc_feature 1..20: note = CEP290-282/-773 targeting domain (RNA)
  source 1..20: mol_type = other RNA
ttgcccaggctggagtgcag

SEQ ID NO: 1190 - skipped

SEQ ID NO: 1191 - RNA, 21 nt, synthetic construct
  misc_feature 1..21: note = CEP290-337 targeting domain (RNA)
  source 1..21: mol_type = other RNA
aaatcatgcaagtgacctaag

SEQ ID NO: 1192 - RNA, 20 nt, synthetic construct
  misc_feature 1..20: note = CEP290-338 targeting domain (RNA)
  source 1..20: mol_type = other RNA
aatcatgcaagtgacctaag

SEQ ID NO: 1193 - RNA, 19 nt, synthetic construct
  misc_feature 1..19: note = CEP290-339 targeting domain (RNA)
  source 1..19: mol_type = other RNA
atcatgcaagtgacctaag

SEQ ID NO: 1194 - RNA, 20 nt, synthetic construct
  misc_feature 1..20: note = CEP290-340 targeting domain (RNA)
  source 1..20: mol_type = other RNA
aggtcacttgcatgatttag

SEQ ID NO: 1195 - RNA, 24 nt, synthetic construct
  misc_feature 1..24: note = CEP290-341 targeting domain (RNA)
  source 1..24: mol_type = other RNA
aatattaagggctcttcctggacc

SEQ ID NO: 1196 - RNA, 23 nt, synthetic construct
  misc_feature 1..23: note = CEP290-342 targeting domain (RNA)
  source 1..23: mol_type = other RNA
atattaagggctcttcctggacc

SEQ ID NO: 1197 - RNA, 21 nt, synthetic construct
  misc_feature 1..21: note = CEP290-343 targeting domain (RNA)
  source 1..21: mol_type = other RNA
attaagggctcttcctggacc

SEQ ID NO: 1198 - RNA, 18 nt, synthetic construct
  misc_feature 1..18: note = CEP290-344 targeting domain (RNA)
  source 1..18: mol_type = other RNA
aagggctcttcctggacc

SEQ ID NO: 1199 - RNA, 19 nt, synthetic construct
  misc_feature 1..19: note = CEP290-345 targeting domain (RNA)
  source 1..19: mol_type = other RNA
aggactttctaatgctgga

SEQ ID NO: 1200 - RNA, 21 nt, synthetic construct
  misc_feature 1..21: note = CEP290-346 targeting domain (RNA)
  source 1..21: mol_type = other RNA
accatgggagaatagtttgtt

SEQ ID NO: 1201 - RNA, 18 nt, synthetic construct
  misc_feature 1..18: note = CEP290-347 targeting domain (RNA)
  source 1..18: mol_type = other RNA
atgggagaatagtttgtt

SEQ ID NO: 1202 - RNA, 23 nt, synthetic construct
  misc_feature 1..23: note = CEP290-348 targeting domain (RNA)
  source 1..23: mol_type = other RNA
actcctgtgaaaggatcttagat

SEQ ID NO: 1203 - RNA, 23 nt, synthetic construct
  misc_feature 1..23: note = CEP290-349 targeting domain (RNA)
  source 1..23: mol_type = other RNA
aaaacgttgttctgagtagcttt

SEQ ID NO: 1204 - RNA, 22 nt, synthetic construct
  misc_feature 1..22: note = CEP290-350 targeting domain (RNA)
  source 1..22: mol_type = other RNA
aaacgttgttctgagtagcttt

SEQ ID NO: 1205 - RNA, 21 nt, synthetic construct
  misc_feature 1..21: note = CEP290-351 targeting domain (RNA)
  source 1..21: mol_type = other RNA
aacgttgttctgagtagcttt

SEQ ID NO: 1206 - skipped

SEQ ID NO: 1207 - RNA, 22 nt, synthetic construct
  misc_feature 1..22: note = CEP290-353 targeting domain (RNA)
  source 1..22: mol_type = other RNA
atttatagtggctgaatgactt

SEQ ID NO: 1208 - RNA, 18 nt, synthetic construct
  misc_feature 1..18: note = CEP290-354 targeting domain (RNA)
  source 1..18: mol_type = other RNA
atagtggctgaatgactt

SEQ ID NO: 1209 - RNA, 22 nt, synthetic construct
  misc_feature 1..22: note = CEP290-355 targeting domain (RNA)
  source 1..22: mol_type = other RNA
atggtccctggcttttgttcct

SEQ ID NO: 1210 - RNA, 24 nt, synthetic construct
  misc_feature 1..24: note = CEP290-356 targeting domain (RNA)
  source 1..24: mol_type = other RNA
agacatcttgtggataatgtatca

SEQ ID NO: 1211 - RNA, 22 nt, synthetic construct
  misc_feature 1..22: note = CEP290-357 targeting domain (RNA)
  source 1..22: mol_type = other RNA
acatcttgtggataatgtatca

SEQ ID NO: 1212 - skipped

SEQ ID NO: 1213 - RNA, 24 nt, synthetic construct
  misc_feature 1..24: note = CEP290-359 targeting domain (RNA)
  source 1..24: mol_type = other RNA
aaagtcctaggcaagagacatctt

SEQ ID NO: 1214 - RNA, 23 nt, synthetic construct
  misc_feature 1..23: note = CEP290-360 targeting domain (RNA)
  source 1..23: mol_type = other RNA
aagtcctaggcaagagacatctt

SEQ ID NO: 1215 - RNA, 22 nt, synthetic construct
  misc_feature 1..22: note = CEP290-361 targeting domain (RNA)
  source 1..22: mol_type = other RNA
agtcctaggcaagagacatctt

SEQ ID NO: 1216 - RNA, 24 nt, synthetic construct
  misc_feature 1..24: note = CEP290-362 targeting domain
  source 1..24: mol_type = other RNA
agccagcaaaagcttttgagctaa

SEQ ID NO: 1217 - skipped

SEQ ID NO: 1218 - RNA, 22 nt, synthetic construct
  misc_feature 1..22: note = CEP290-364 targeting domain (RNA)
  source 1..22: mol_type = other RNA
agatcttattctactcctgtga

SEQ ID NO: 1219 - skipped

SEQ ID NO: 1220 - RNA, 22 nt, synthetic construct
  misc_feature 1..22: note = CEP290-366 targeting domain (RNA)
  source 1..22: mol_type = other RNA
atctaagatcctttcacaggag

SEQ ID NO: 1221 - RNA, 18 nt, synthetic construct
  misc_feature 1..18: note = CEP290-369 targeting domain (RNA)
  source 1..18: mol_type = other RNA
aagatcctttcacaggag

SEQ ID NO: 1222 - RNA, 24 nt, synthetic construct
  misc_feature 1..24: note = CEP290-370 targeting domain (RNA)
  source 1..24: mol_type = other RNA
agctttcaggattcctactaaatt

SEQ ID NO: 1223 - RNA, 23 nt, synthetic construct
  misc_feature 1..23: note = CEP290-371 targeting domain (RNA)
  source 1..23: mol_type = other RNA
actcagaacaacgttttcattta

SEQ ID NO: 1224 - RNA, 19 nt, synthetic construct
  misc_feature 1..19: note = CEP290-372 targeting domain (RNA)
  source 1..19: mol_type = other RNA
agaacaacgttttcattta

SEQ ID NO: 1225 - RNA, 22 nt, synthetic construct
  misc_feature 1..22: note = CEP290-373 targeting domain (RNA)
  source 1..22: mol_type = other RNA
agaatatcataagttacaatct

SEQ ID NO: 1226 - RNA, 20 nt, synthetic construct
  misc_feature 1..20: note = CEP290-375 targeting domain (RNA)
  source 1..20: mol_type = other RNA
aatatcataagttacaatct

SEQ ID NO: 1227 - RNA, 19 nt, synthetic construct
  misc_feature 1..19: note = CEP290-376 targeting domain (RNA)
  source 1..19: mol_type = other RNA
atatcataagttacaatct

SEQ ID NO: 1228 - RNA, 22 nt, synthetic construct
  misc_feature 1..22: note = CEP290-377 targeting domain (RNA)
  source 1..22: mol_type = other RNA
aagtggctgtaagataactaca

SEQ ID NO: 1229 - RNA, 21 nt, synthetic construct
  misc_feature 1..21: note = CEP290-378 targeting domain (RNA)
  source 1..21: mol_type = other RNA
agtggctgtaagataactaca

SEQ ID NO: 1230 - RNA, 24 nt, synthetic construct
  misc_feature 1..24: note = CEP290-379 targeting domain (RNA)
  source 1..24: mol_type = other RNA
atgtttaacgttatcattttccca

SEQ ID NO: 1231 - RNA, 18 nt, synthetic construct
  misc_feature 1..18: note = CEP290-380 targeting domain (RNA)
  source 1..18: mol_type = other RNA
aacgttatcattttccca

SEQ ID NO: 1232 - RNA, 22 nt, synthetic construct
  misc_feature 1..22: note = CEP290-381 targeting domain (RNA)
  source 1..22: mol_type = other RNA
aagagaaagggatgggcactta

SEQ ID NO: 1233 - RNA, 21 nt, synthetic construct
  misc_feature 1..21: note = CEP290-382 targeting domain (RNA)
  source 1..21: mol_type = other RNA
agagaaagggatgggcactta

SEQ ID NO: 1234 - RNA, 19 nt, synthetic construct
  misc_feature 1..19: note = CEP290-383 targeting domain (RNA)
  source 1..19: mol_type = other RNA
agaaagggatgggcactta

SEQ ID NO: 1235 - RNA, 23 nt, synthetic construct
  misc_feature 1..23: note = CEP290-384 targeting domain (RNA)
  source 1..23: mol_type = other RNA
attcagtaaatgaaaacgttgtt

SEQ ID NO: 1236 - RNA, 19 nt, synthetic construct
  misc_feature 1..19: note = CEP290-385 targeting domain (RNA)
  source 1..19: mol_type = other RNA
agtaaatgaaaacgttgtt

SEQ ID NO: 1237 - RNA, 23 nt, synthetic construct
  misc_feature 1..23: note = CEP290-386 targeting domain (RNA)
  source 1..23: mol_type = other RNA
ataaacatgactcataatttagt

SEQ ID NO: 1238 - RNA, 21 nt, synthetic construct
  misc_feature 1..21: note = CEP290-387 targeting domain (RNA)
  source 1..21: mol_type = other RNA
aaacatgactcataatttagt

SEQ ID NO: 1239 - skipped

SEQ ID NO: 1240 - RNA, 19 nt, synthetic construct
  misc_feature 1..19: note = CEP290-389 targeting domain (RNA)
  source 1..19: mol_type = other RNA
acatgactcataatttagt

SEQ ID NO: 1241 - RNA, 23 nt, synthetic construct
  misc_feature 1..23: note = CEP290-390 targeting domain (RNA)
  source 1..23: mol_type = other RNA
attcttatctaagatcctttcac

SEQ ID NO: 1242 - RNA, 24 nt, synthetic construct
  misc_feature 1..24: note = CEP290-391 targeting domain (RNA)
  source 1..24: mol_type = other RNA
aggaacaaaagccagggaccatgg

SEQ ID NO: 1243 - RNA, 21 nt, synthetic construct
  misc_feature 1..21: note = CEP290-392 targeting domain (RNA)
  source 1..21: mol_type = other RNA
aacaaaagccagggaccatgg

SEQ ID NO: 1244 - RNA, 20 nt, synthetic construct
  misc_feature 1..20: note = CEP290-393 targeting domain (RNA)
  source 1..20: mol_type = other RNA
acaaaagccagggaccatgg

SEQ ID NO: 1245 - RNA, 18 nt, synthetic construct
  misc_feature 1..18: note = CEP290-394 targeting domain (RNA)
  source 1..18: mol_type = other RNA
aaaagccagggaccatgg

SEQ ID NO: 1246 - RNA, 21 nt, synthetic construct
  misc_feature 1..21: note = CEP290-395 targeting domain (RNA)
  source 1..21: mol_type = other RNA
agaatagtttgttctgggtac

SEQ ID NO: 1247 - RNA, 19 nt, synthetic construct
  misc_feature 1..19: note = CEP290-396 targeting domain (RNA)
  source 1..19: mol_type = other RNA
aatagtttgttctgggtac

SEQ ID NO: 1248 - RNA, 18 nt, synthetic construct
  misc_feature 1..18: note = CEP290-397 targeting domain (RNA)
  source 1..18: mol_type = other RNA
atagtttgttctgggtac

SEQ ID NO: 1249 - RNA, 24 nt, synthetic construct
  misc_feature 1..24: note = CEP290-398 targeting domain (RNA)
  source 1..24: mol_type = other RNA
atcagaaatagaggcttatggatt

SEQ ID NO: 1250 - RNA, 21 nt, synthetic construct
  misc_feature 1..21: note = CEP290-399 targeting domain (RNA)
  source 1..21: mol_type = other RNA
agaaatagaggcttatggatt

SEQ ID NO: 1251 - RNA, 19 nt, synthetic construct
  misc_feature 1..19: note = CEP290-400 targeting domain (RNA)
  source 1..19: mol_type = other RNA
aaatagaggcttatggatt

SEQ ID NO: 1252 - RNA, 18 nt, synthetic construct
  misc_feature 1..18: note = CEP290-401 targeting domain (RNA)
  source 1..18: mol_type = other RNA
aatagaggcttatggatt

SEQ ID NO: 1253 - RNA, 23 nt, synthetic construct
  misc_feature 1..23: note = CEP290-402 targeting domain (RNA)
  source 1..23: mol_type = other RNA
aatatattatctatttatagtgg

SEQ ID NO: 1254 - RNA, 22 nt, synthetic construct
  misc_feature 1..22: note = CEP290-403 targeting domain (RNA)
  source 1..22: mol_type = other RNA
atatattatctatttatagtgg

SEQ ID NO: 1255 - RNA, 20 nt, synthetic construct
  misc_feature 1..20: note = CEP290-404 targeting domain (RNA)
  source 1..20: mol_type = other RNA
atattatctatttatagtgg

SEQ ID NO: 1256 - RNA, 18 nt, synthetic construct
  misc_feature 1..18: note = CEP290-405 targeting domain (RNA)
  source 1..18: mol_type = other RNA
attatctatttatagtgg

SEQ ID NO: 1257 - RNA, 22 nt, synthetic construct
  misc_feature 1..22: note = CEP290-406 targeting domain (RNA)
  source 1..22: mol_type = other RNA
aaattctcatcattttttattg

SEQ ID NO: 1258 - RNA, 21 nt, synthetic construct
  misc_feature 1..21: note = CEP290-407 targeting domain (RNA)
  source 1..21: mol_type = other RNA
aattctcatcattttttattg

SEQ ID NO: 1259 - RNA, 20 nt, synthetic construct
  misc_feature 1..20: note = CEP290-408 targeting domain (RNA)
  source 1..20: mol_type = other RNA
attctcatcattttttattg

SEQ ID NO: 1260 - RNA, 22 nt, synthetic construct
  misc_feature 1..22: note = CEP290-409 targeting domain (RNA)
  source 1..22: mol_type = other RNA
agaggataggacagaggacatg

SEQ ID NO: 1261 - skipped

SEQ ID NO: 1262 - RNA, 23 nt, synthetic construct
  misc_feature 1..23: note = CEP290-411 targeting domain (RNA)
  source 1..23: mol_type = other RNA
agaataaatgtagaattttaatg

SEQ ID NO: 1263 - RNA, 21 nt, synthetic construct
  misc_feature 1..21: note = CEP290-412 targeting domain (RNA)
  source 1..21: mol_type = other RNA
aataaatgtagaattttaatg

SEQ ID NO: 1264 - RNA, 20 nt, synthetic construct
  misc_feature 1..20: note = CEP290-413 targeting domain (RNA)
  source 1..20: mol_type = other RNA
ataaatgtagaattttaatg

SEQ ID NO: 1265 - RNA, 18 nt, synthetic construct
  misc_feature 1..18: note = CEP290-414 targeting domain (RNA)
  source 1..18: mol_type = other RNA
aaatgtagaattttaatg

SEQ ID NO: 1266 - RNA, 22 nt, synthetic construct
  misc_feature 1..22: note = CEP290-415 targeting domain (RNA)
  source 1..22: mol_type = other RNA
attttttattgtagaataaatg

SEQ ID NO: 1267 - RNA, 23 nt, synthetic construct
  misc_feature 1..23: note = CEP290-416 targeting domain (RNA)
  source 1..23: mol_type = other RNA
ctaaatcatgcaagtgacctaag

SEQ ID NO: 1268 - RNA, 24 nt, synthetic construct
  misc_feature 1..24: note = CEP290-417 targeting domain (RNA)
  source 1..24: mol_type = other RNA
ccttaggtcacttgcatgatttag

SEQ ID NO: 1269 - RNA, 23 nt, synthetic construct
  misc_feature 1..23: note = CEP290-418 targeting domain (RNA)
  source 1..23: mol_type = other RNA
cttaggtcacttgcatgatttag

SEQ ID NO: 1270 - RNA, 22 nt, synthetic construct
  misc_feature 1..22: note = CEP290-419 targeting domain (RNA)
  source 1..22: mol_type = other RNA
cctaggactttctaatgctgga

SEQ ID NO: 1271 - RNA, 21 nt, synthetic construct
  misc_feature 1..21: note = CEP290-420 targeting domain (RNA)
  source 1..21: mol_type = other RNA
ctaggactttctaatgctgga

SEQ ID NO: 1272 - RNA, 20 nt, synthetic construct
  misc_feature 1..20: note = CEP290-421 targeting domain (RNA)
  source 1..20: mol_type = other RNA
ccatgggagaatagtttgtt

SEQ ID NO: 1273 - RNA, 19 nt, synthetic construct
  misc_feature 1..19: note = CEP290-422 targeting domain (RNA)
  source 1..19: mol_type = other RNA
catgggagaatagtttgtt

SEQ ID NO: 1274 - RNA, 22 nt, synthetic construct
  misc_feature 1..22: note = CEP290-423 targeting domain (RNA)
  source 1..22: mol_type = other RNA
ctcctgtgaaaggatcttagat

SEQ ID NO: 1275 - skipped

SEQ ID NO: 1276 - RNA, 19 nt, synthetic construct
  misc_feature 1..19: note = CEP290-426 targeting domain (RNA)
  source 1..19: mol_type = other RNA
ctgtgaaaggatcttagat

SEQ ID NO: 1277 - RNA, 21 nt, synthetic construct
  misc_feature 1..21: note = CEP290-427 targeting domain (RNA)
  source 1..21: mol_type = other RNA
ccctggcttttgttccttgga

SEQ ID NO: 1278 - RNA, 20 nt, synthetic construct
  misc_feature 1..20: note = CEP290-428 targeting domain (RNA)
  source 1..20: mol_type = other RNA
cctggcttttgttccttgga

SEQ ID NO: 1279 - RNA, 19 nt, synthetic construct
  misc_feature 1..19: note = CEP290-429 targeting domain (RNA)
  source 1..19: mol_type = other RNA
ctggcttttgttccttgga

SEQ ID NO: 1280 - RNA, 19 nt, synthetic construct
  misc_feature 1..19: note = CEP290-430 targeting domain (RNA)
  source 1..19: mol_type = other RNA
cgttgttctgagtagcttt

SEQ ID NO: 1281 - RNA, 24 nt, synthetic construct
  misc_feature 1..24: note = CEP290-431 targeting domain (RNA)
  source 1..24: mol_type = other RNA
ctatttatagtggctgaatgactt

SEQ ID NO: 1282 - RNA, 24 nt, synthetic construct
  misc_feature 1..24: note = CEP290-432 targeting domain (RNA)
  source 1..24: mol_type = other RNA
ccatggtccctggcttttgttcct

SEQ ID NO: 1283 - RNA, 23 nt, synthetic construct
  misc_feature 1..23: note = CEP290-433 targeting domain (RNA)
  source 1..23: mol_type = other RNA
catggtccctggcttttgttcct

SEQ ID NO: 1284 - RNA, 21 nt, synthetic construct
  misc_feature 1..21: note = CEP290-434 targeting domain (RNA)
  source 1..21: mol_type = other RNA
catcttgtggataatgtatca

SEQ ID NO: 1285 - RNA, 18 nt, synthetic construct
  misc_feature 1..18: note = CEP290-435 targeting domain (RNA)
  source 1..18: mol_type = other RNA
cttgtggataatgtatca

SEQ ID NO: 1286 - RNA, 19 nt, synthetic construct
  misc_feature 1..19: note = CEP290-437 targeting domain (RNA)
  source 1..19: mol_type = other RNA
cctaggcaagagacatctt

SEQ ID NO: 1287 - RNA, 18 nt, synthetic construct
  misc_feature 1..18: note = CEP290-438 targeting domain (RNA)
  source 1..18: mol_type = other RNA
ctaggcaagagacatctt

SEQ ID NO: 1288 - RNA, 22 nt, synthetic construct
  misc_feature 1..22: note = CEP290-439 targeting domain (RNA)
  source 1..22: mol_type = other RNA
ccagcaaaagcttttgagctaa

SEQ ID NO: 1289 - RNA, 21 nt, synthetic construct
  misc_feature 1..21: note = CEP290-440 targeting domain (RNA)
  source 1..21: mol_type = other RNA
cagcaaaagcttttgagctaa

SEQ ID NO: 1290 - RNA, 18 nt, synthetic construct
  misc_feature 1..18: note = CEP290-441 targeting domain (RNA)
  source 1..18: mol_type = other RNA
caaaagcttttgagctaa

SEQ ID NO: 1291 - RNA, 18 nt, synthetic construct
  misc_feature 1..18: note = CEP290-442 targeting domain (RNA)
  source 1..18: mol_type = other RNA
cttattctactcctgtga

SEQ ID NO: 1292 - skipped

SEQ ID NO: 1293 - RNA, 24 nt, synthetic construct
  misc_feature 1..24: note = CEP290-444 targeting domain (RNA)
  source 1..24: mol_type = other RNA
cttcctcatcagaaatagaggctt

SEQ ID NO: 1294 - RNA, 21 nt, synthetic construct
  misc_feature 1..21: note = CEP290-445 targeting domain (RNA)
  source 1..21: mol_type = other RNA
cctcatcagaaatagaggctt

SEQ ID NO: 1295 - skipped

SEQ ID NO: 1296 - RNA, 18 nt, synthetic construct
  misc_feature 1..18: note = CEP290-447 targeting domain (RNA)
  source 1..18: mol_type = other RNA
catcagaaatagaggctt

SEQ ID NO: 1297 - RNA, 22 nt, synthetic construct
  misc_feature 1..22: note = CEP290-448 targeting domain (RNA)
  source 1..22: mol_type = other RNA
ctttcaggattcctactaaatt

SEQ ID NO: 1298 - RNA, 18 nt, synthetic construct
  misc_feature 1..18: note = CEP290-449 targeting domain (RNA)
  source 1..18: mol_type = other RNA
caggattcctactaaatt

SEQ ID NO: 1299 - RNA, 19 nt, synthetic construct
  misc_feature 1..19: note = CEP290-450 targeting domain (RNA)
  source 1..19: mol_type = other RNA
ctgtcctcagtaaaaggta

SEQ ID NO: 1300 - RNA, 22 nt, synthetic construct
  misc_feature 1..22: note = CEP290-451 targeting domain (RNA)
  source 1..22: mol_type = other RNA
ctcagaacaacgttttcattta

SEQ ID NO: 1301 - skipped

SEQ ID NO: 1302 - RNA, 23 nt, synthetic construct
  misc_feature 1..23: note = CEP290-453 targeting domain (RNA)
  source 1..23: mol_type = other RNA
caagtggctgtaagataactaca

SEQ ID NO: 1303 - RNA, 24 nt, synthetic construct
  misc_feature 1..24: note = CEP290-454 targeting domain (RNA)
  source 1..24: mol_type = other RNA
cattcagtaaatgaaaacgttgtt

SEQ ID NO: 1304 - skipped

SEQ ID NO: 1305 - RNA, 18 nt, synthetic construct
  misc_feature 1..18: note = CEP290-458 targeting domain (RNA)
  source 1..18: mol_type = other RNA
catgactcataatttagt

SEQ ID NO: 1306 - skipped

SEQ ID NO: 1307 - RNA, 19 nt, synthetic construct
  misc_feature 1..19: note = CEP290-460 targeting domain (RNA)
  source 1..19: mol_type = other RNA
caaaagccagggaccatgg

SEQ ID NO: 1308 - RNA, 22 nt, synthetic construct
  misc_feature 1..22: note = CEP290-461 targeting domain (RNA)
  source 1..22: mol_type = other RNA
cagaaatagaggcttatggatt

SEQ ID NO: 1309 - RNA, 21 nt, synthetic construct
  misc_feature 1..21: note = CEP290-462 targeting domain (RNA)
  source 1..21: mol_type = other RNA
ctgggtacaggggtaagagaa

SEQ ID NO: 1310 - RNA, 24 nt, synthetic construct
  misc_feature 1..24: note = CEP290-463 targeting domain (RNA)
  source 1..24: mol_type = other RNA
caatatattatctatttatagtgg

SEQ ID NO: 1311 - RNA, 23 nt, synthetic construct
  misc_feature 1..23: note = CEP290-464 targeting domain (RNA)
  source 1..23: mol_type = other RNA
cattttttattgtagaataaatg

SEQ ID NO: 1312 - RNA, 22 nt, synthetic construct
  misc_feature 1..22: note = Targeting domain
  source 1..22: mol_type = other RNA
taaatcatgcaagtgacctaag

SEQ ID NO: 1313 - RNA, 18 nt, synthetic construct
  misc_feature 1..18: note = Targeting domain
  source 1..18: mol_type = other RNA
tcatgcaagtgacctaag

SEQ ID NO: 1314 - RNA, 22 nt, synthetic construct
  misc_feature 1..22: note = Targeting domain
  source 1..22: mol_type = other RNA
ttaggtcacttgcatgatttag

SEQ ID NO: 1315 - RNA, 21 nt, synthetic construct
  misc_feature 1..21: note = Targeting domain
  source 1..21: mol_type = other RNA
taggtcacttgcatgatttag

SEQ ID NO: 1316 - RNA, 22 nt, synthetic construct
  misc_feature 1..22: note = Targeting domain
  source 1..22: mol_type = other RNA
tattaagggctcttcctggacc

SEQ ID NO: 1317 - RNA, 20 nt, synthetic construct
  misc_feature 1..20: note = Targeting domain
  source 1..20: mol_type = other RNA
ttaagggctcttcctggacc

SEQ ID NO: 1318 - RNA, 19 nt, synthetic construct
  misc_feature 1..19: note = Targeting domain
  source 1..19: mol_type = other RNA
taagggctcttcctggacc

SEQ ID NO: 1319 - RNA, 24 nt, synthetic construct
  misc_feature 1..24: note = Targeting domain
  source 1..24: mol_type = other RNA
tgcctaggactttctaatgctgga

SEQ ID NO: 1320 - skipped

SEQ ID NO: 1321 - RNA, 24 nt, synthetic construct
  misc_feature 1..24: note = CEP290-474 targeting domain (RNA)
  source 1..24: mol_type = other RNA
tactcctgtgaaaggatcttagat

SEQ ID NO: 1322 - RNA, 21 nt, synthetic construct
  misc_feature 1..21: note = Targeting domain
  source 1..21: mol_type = other RNA
tcctgtgaaaggatcttagat

SEQ ID NO: 1323 - RNA, 18 nt, synthetic construct
  misc_feature 1..18: note = Targeting domain
  source 1..18: mol_type = other RNA
tgtgaaaggatcttagat

SEQ ID NO: 1324 - RNA, 22 nt, synthetic construct
  misc_feature 1..22: note = Targeting domain
  source 1..22: mol_type = other RNA
tccctggcttttgttccttgga

SEQ ID NO: 1325 - RNA, 18 nt, synthetic construct
  misc_feature 1..18: note = Targeting domain
  source 1..18: mol_type = other RNA
tggcttttgttccttgga

SEQ ID NO: 1326 - RNA, 23 nt, synthetic construct
  misc_feature 1..23: note = Targeting domain
  source 1..23: mol_type = other RNA
tatttatagtggctgaatgactt

SEQ ID NO: 1327 - RNA, 21 nt, synthetic construct
  misc_feature 1..21: note = Targeting domain
  source 1..21: mol_type = other RNA
tttatagtggctgaatgactt

SEQ ID NO: 1328 - RNA, 20 nt, synthetic construct
  misc_feature 1..20: note = Targeting domain
  source 1..20: mol_type = other RNA
ttatagtggctgaatgactt

SEQ ID NO: 1329 - RNA, 19 nt, synthetic construct
  misc_feature 1..19: note = Targeting domain
  source 1..19: mol_type = other RNA
tatagtggctgaatgactt

SEQ ID NO: 1330 - RNA, 21 nt, synthetic construct
  misc_feature 1..21: note = Targeting domain
  source 1..21: mol_type = other RNA
tggtccctggcttttgttcct

SEQ ID NO: 1331 - RNA, 18 nt, synthetic construct
  misc_feature 1..18: note = Targeting domain
  source 1..18: mol_type = other RNA
tccctggcttttgttcct

SEQ ID NO: 1332 - RNA, 19 nt, synthetic construct
  misc_feature 1..19: note = Targeting domain
  source 1..19: mol_type = other RNA
tcttgtggataatgtatca

SEQ ID NO: 1333 - skipped

SEQ ID NO: 1334 - RNA, 24 nt, synthetic construct
  misc_feature 1..24: note = Targeting domain
  source 1..24: mol_type = other RNA
ttagatcttattctactcctgtga

SEQ ID NO: 1335 - RNA, 23 nt, synthetic construct
  misc_feature 1..23: note = Targeting domain
  source 1..23: mol_type = other RNA
tagatcttattctactcctgtga

SEQ ID NO: 1336 - RNA, 19 nt, synthetic construct
  misc_feature 1..19: note = Targeting domain
  source 1..19: mol_type = other RNA
tcttattctactcctgtga

SEQ ID NO: 1337 - RNA, 24 nt, synthetic construct
  misc_feature 1..24: note = CEP290-527 targeting domain (RNA)
  source 1..24: mol_type = other RNA
ttatctaagatcctttcacaggag

SEQ ID NO: 1338 - RNA, 23 nt, synthetic construct
  misc_feature 1..23: note = CEP290-528 targeting domain (RNA)
  source 1..23: mol_type = other RNA
tatctaagatcctttcacaggag

SEQ ID NO: 1339 - RNA, 21 nt, synthetic construct
  misc_feature 1..21: note = CEP290-529 targeting domain (RNA)
  source 1..21: mol_type = other RNA
tctaagatcctttcacaggag

SEQ ID NO: 1340 - RNA, 19 nt, synthetic construct
  misc_feature 1..19: note = Targeting domain
  source 1..19: mol_type = other RNA
taagatcctttcacaggag

SEQ ID NO: 1341 - RNA, 23 nt, synthetic construct
  misc_feature 1..23: note = Targeting domain
  source 1..23: mol_type = other RNA
ttcctcatcagaaatagaggctt

SEQ ID NO: 1342 - RNA, 22 nt, synthetic construct
  misc_feature 1..22: note = Targeting domain
  source 1..22: mol_type = other RNA
tcctcatcagaaatagaggctt

SEQ ID NO: 1343 - RNA, 19 nt, synthetic construct
  misc_feature 1..19: note = Targeting domain
  source 1..19: mol_type = other RNA
tcatcagaaatagaggctt

SEQ ID NO: 1344 - RNA, 21 nt, synthetic construct
  misc_feature 1..21: note = Targeting domain
  source 1..21: mol_type = other RNA
tttcaggattcctactaaatt

SEQ ID NO: 1345 - skipped

SEQ ID NO: 1346 - RNA, 19 nt, synthetic construct
  misc_feature 1..19: note = Targeting domain
  source 1..19: mol_type = other RNA
tcaggattcctactaaatt

SEQ ID NO: 1347 - RNA, 24 nt, synthetic construct
  misc_feature 1..24: note = Targeting domain
  source 1..24: mol_type = other RNA
ttgttctgtcctcagtaaaaggta

SEQ ID NO: 1348 - RNA, 23 nt, synthetic construct
  misc_feature 1..23: note = Targeting domain
  source 1..23: mol_type = other RNA
tgttctgtcctcagtaaaaggta

SEQ ID NO: 1349 - RNA, 21 nt, synthetic construct
  misc_feature 1..21: note = Targeting domain
  source 1..21: mol_type = other RNA
ttctgtcctcagtaaaaggta

SEQ ID NO: 1350 - skipped

SEQ ID NO: 1351 - RNA, 18 nt, synthetic construct
  misc_feature 1..18: note = Targeting domain
  source 1..18: mol_type = other RNA
tgtcctcagtaaaaggta

SEQ ID NO: 1352 - RNA, 24 nt, synthetic construct
  misc_feature 1..24: note = Targeting domain
  source 1..24: mol_type = other RNA
tactcagaacaacgttttcattta

SEQ ID NO: 1353 - RNA, 21 nt, synthetic construct
  misc_feature 1..21: note = Targeting domain
  source 1..21: mol_type = other RNA
tcagaacaacgttttcattta

SEQ ID NO: 1354 - RNA, 23 nt, synthetic construct
  misc_feature 1..23: note = Targeting domain
  source 1..23: mol_type = other RNA
tagaatatcataagttacaatct

SEQ ID NO: 1355 - RNA, 18 nt, synthetic construct
  misc_feature 1..18: note = Targeting domain
  source 1..18: mol_type = other RNA
tatcataagttacaatct

SEQ ID NO: 1356 - RNA, 24 nt, synthetic construct
  misc_feature 1..24: note = Targeting domain
  source 1..24: mol_type = other RNA
tcaagtggctgtaagataactaca

SEQ ID NO: 1357 - RNA, 19 nt, synthetic construct
  misc_feature 1..19: note = Targeting domain
  source 1..19: mol_type = other RNA
tggctgtaagataactaca

SEQ ID NO: 1358 - RNA, 23 nt, synthetic construct
  misc_feature 1..23: note = Targeting domain
  source 1..23: mol_type = other RNA
tgtttaacgttatcattttccca

SEQ ID NO: 1359 - RNA, 21 nt, synthetic construct
  misc_feature 1..21: note = Targeting domain
  source 1..21: mol_type = other RNA
tttaacgttatcattttccca

SEQ ID NO: 1360 - skipped

SEQ ID NO: 1361 - RNA, 19 nt, synthetic construct
  misc_feature 1..19: note = Targeting domain
  source 1..19: mol_type = other RNA
taacgttatcattttccca

SEQ ID NO: 1362 - RNA, 23 nt, synthetic construct
  misc_feature 1..23: note = Targeting domain
  source 1..23: mol_type = other RNA
taagagaaagggatgggcactta

SEQ ID NO: 1363 - RNA, 22 nt, synthetic construct
  misc_feature 1..22: note = Targeting domain
  source 1..22: mol_type = other RNA
ttcagtaaatgaaaacgttgtt

SEQ ID NO: 1364 - RNA, 21 nt, synthetic construct
  misc_feature 1..21: note = Targeting domain
  source 1..21: mol_type = other RNA
tcagtaaatgaaaacgttgtt

SEQ ID NO: 1365 - RNA, 22 nt, synthetic construct
  misc_feature 1..22: note = Targeting domain
  source 1..22: mol_type = other RNA
taaacatgactcataatttagt

SEQ ID NO: 1366 - RNA, 24 nt, synthetic construct
  misc_feature 1..24: note = Targeting domain
  source 1..24: mol_type = other RNA
tattcttatctaagatcctttcac

SEQ ID NO: 1367 - RNA, 22 nt, synthetic construct
  misc_feature 1..22: note = Targeting domain
  source 1..22: mol_type = other RNA
ttcttatctaagatcctttcac

SEQ ID NO: 1368 - RNA, 21 nt, synthetic construct
  misc_feature 1..21: note = Targeting domain
  source 1..21: mol_type = other RNA
tcttatctaagatcctttcac

SEQ ID NO: 1369 - RNA, 19 nt, synthetic construct
  misc_feature 1..19: note = Targeting domain
  source 1..19: mol_type = other RNA
ttatctaagatcctttcac

SEQ ID NO: 1370 - RNA, 18 nt, synthetic construct
  misc_feature 1..18: note = Targeting domain
  source 1..18: mol_type = other RNA
tatctaagatcctttcac

SEQ ID NO: 1371 - RNA, 23 nt, synthetic construct
  misc_feature 1..23: note = Targeting domain
  source 1..23: mol_type = other RNA
tcagaaatagaggcttatggatt

SEQ ID NO: 1372 - RNA, 23 nt, synthetic construct
  misc_feature 1..23: note = Targeting domain
  source 1..23: mol_type = other RNA
ttctgggtacaggggtaagagaa

SEQ ID NO: 1373 - RNA, 22 nt, synthetic construct
  misc_feature 1..22: note = Targeting domain
  source 1..22: mol_type = other RNA
tctgggtacaggggtaagagaa

SEQ ID NO: 1374 - RNA, 20 nt, synthetic construct
  misc_feature 1..20: note = Targeting domain
  source 1..20: mol_type = other RNA
tgggtacaggggtaagagaa

SEQ ID NO: 1375 - RNA, 21 nt, synthetic construct
  misc_feature 1..21: note = Targeting domain
  source 1..21: mol_type = other RNA
tatattatctatttatagtgg

SEQ ID NO: 1376 - RNA, 19 nt, synthetic construct
  misc_feature 1..19: note = Targeting domain
  source 1..19: mol_type = other RNA
tattatctatttatagtgg

SEQ ID NO: 1377 - RNA, 23 nt, synthetic construct
  misc_feature 1..23: note = Targeting domain
  source 1..23: mol_type = other RNA
taaattctcatcattttttattg

SEQ ID NO: 1378 - RNA, 19 nt, synthetic construct
  misc_feature 1..19: note = Targeting domain
  source 1..19: mol_type = other RNA
ttctcatcattttttattg

SEQ ID NO: 1379 - RNA, 18 nt, synthetic construct
  misc_feature 1..18: note = Targeting domain
  source 1..18: mol_type = other RNA
tctcatcattttttattg

SEQ ID NO: 1380 - RNA, 24 nt, synthetic construct
  misc_feature 1..24: note = Targeting domain
  source 1..24: mol_type = other RNA
tagaataaatgtagaattttaatg

SEQ ID NO: 1381 - RNA, 19 nt, synthetic construct
  misc_feature 1..19: note = Targeting domain
  source 1..19: mol_type = other RNA
taaatgtagaattttaatg

SEQ ID NO: 1382 - RNA, 24 nt, synthetic construct
  misc_feature 1..24: note = CEP290-572 targeting domain (RNA)
  source 1..24: mol_type = other RNA
tcattttttattgtagaataaatg

SEQ ID NO: 1383 - RNA, 21 nt, synthetic construct
  misc_feature 1..21: note = Targeting domain
  source 1..21: mol_type = other RNA
ttttttattgtagaataaatg

SEQ ID NO: 1384 - RNA, 20 nt, synthetic construct
  misc_feature 1..20: note = Targeting domain
  source 1..20: mol_type = other RNA
tttttattgtagaataaatg

SEQ ID NO: 1385 - RNA, 19 nt, synthetic construct
  misc_feature 1..19: note = Targeting domain
  source 1..19: mol_type = other RNA
ttttattgtagaataaatg

SEQ ID NO: 1386 - RNA, 18 nt, synthetic construct
  misc_feature 1..18: note = Targeting domain
  source 1..18: mol_type = other RNA
tttattgtagaataaatg

SEQ ID NO: 1387 - RNA, 19 nt, synthetic construct
  misc_feature 1..19: note = Targeting domain
  source 1..19: mol_type = other RNA
aaaagctaccggttacctg

SEQ ID NO: 1388 - RNA, 18 nt, synthetic construct
  misc_feature 1..18: note = Targeting domain
  source 1..18: mol_type = other RNA
aaagctaccggttacctg

SEQ ID NO: 1389 - RNA, 24 nt, synthetic construct
  misc_feature 1..24: note = Targeting domain
  source 1..24: mol_type = other RNA
agtttttaaggcggggagtcacat

SEQ ID NO: 1390 - RNA, 19 nt, synthetic construct
  misc_feature 1..19: note = Targeting domain
  source 1..19: mol_type = other RNA
acatcctccttactgccac

SEQ ID NO: 1391 - RNA, 23 nt, synthetic construct
  misc_feature 1..23: note = CEP290-581 targeting domain (RNA)
  source 1..23: mol_type = other RNA
agtcacagggtaggattcatgtt

SEQ ID NO: 1392 - RNA, 19 nt, synthetic construct
  misc_feature 1..19: note = Targeting domain
  source 1..19: mol_type = other RNA
acagggtaggattcatgtt

SEQ ID NO: 1393 - RNA, 21 nt, synthetic construct
  misc_feature 1..21: note = Targeting domain
  source 1..21: mol_type = other RNA
acagagttcaagctaatacat

SEQ ID NO: 1394 - RNA, 19 nt, synthetic construct
  misc_feature 1..19: note = Targeting domain
  source 1..19: mol_type = other RNA
agagttcaagctaatacat

SEQ ID NO: 1395 - RNA, 24 nt, synthetic construct
  misc_feature 1..24: note = CEP290-585 targeting domain (RNA)
  source 1..24: mol_type = other RNA
ataagatgcagaactagtgtagac

SEQ ID NO: 1396 - RNA, 22 nt, synthetic construct
  misc_feature 1..22: note = Targeting domain
  source 1..22: mol_type = other RNA
aagatgcagaactagtgtagac

SEQ ID NO: 1397 - RNA, 21 nt, synthetic construct
  misc_feature 1..21: note = Targeting domain
  source 1..21: mol_type = other RNA
agatgcagaactagtgtagac

SEQ ID NO: 1398 - RNA, 19 nt, synthetic construct
  misc_feature 1..19: note = Targeting domain
  source 1..19: mol_type = other RNA
atgcagaactagtgtagac

SEQ ID NO: 1399 - RNA, 18 nt, synthetic construct
  misc_feature 1..18: note = Targeting domain
  source 1..18: mol_type = other RNA
agtatctcctgtttggca

SEQ ID NO: 1400 - RNA, 23 nt, synthetic construct
  misc_feature 1..23: note = CEP290-590 targeting domain (RNA)
  source 1..23: mol_type = other RNA
acgaaaatcagatttcatgtgtg

SEQ ID NO: 1401 - RNA, 20 nt, synthetic construct
  misc_feature 1..20: note = Targeting domain
  source 1..20: mol_type = other RNA
aaaatcagatttcatgtgtg

SEQ ID NO: 1402 - RNA, 19 nt, synthetic construct
  misc_feature 1..19: note = Targeting domain
  source 1..19: mol_type = other RNA
aaatcagatttcatgtgtg

SEQ ID NO: 1403 - RNA, 18 nt, synthetic construct
  misc_feature 1..18: note = Targeting domain
  source 1..18: mol_type = other RNA
aatcagatttcatgtgtg

SEQ ID NO: 1404 - RNA, 21 nt, synthetic construct
  misc_feature 1..21: note = CEP290-594 targeting domain (RNA)
  source 1..21: mol_type = other RNA
acaagaatgatcattctaaac

SEQ ID NO: 1405 - RNA, 19 nt, synthetic construct
  misc_feature 1..19: note = Targeting domain
  source 1..19: mol_type = other RNA
aagaatgatcattctaaac

SEQ ID NO: 1406 - RNA, 18 nt, synthetic construct
  misc_feature 1..18: note = Targeting domain
  source 1..18: mol_type = other RNA
agaatgatcattctaaac

SEQ ID NO: 1407 - RNA, 24 nt, synthetic construct
  misc_feature 1..24: note = Targeting domain
  source 1..24: mol_type = other RNA
aggcggggagtcacatgggagtca

SEQ ID NO: 1408 - RNA, 23 nt, synthetic construct
  misc_feature 1..23: note = Targeting domain
  source 1..23: mol_type = other RNA
agcttttgacagtttttaaggcg

SEQ ID NO: 1409 - RNA, 24 nt, synthetic construct
  misc_feature 1..24: note = Targeting domain
  source 1..24: mol_type = other RNA
aatgatcattcttgtggcagtaag

SEQ ID NO: 1410 - RNA, 23 nt, synthetic construct
  misc_feature 1..23: note = Targeting domain
  source 1..23: mol_type = other RNA
atgatcattcttgtggcagtaag

SEQ ID NO: 1411 - skipped

SEQ ID NO: 1412 - RNA, 23 nt, synthetic construct
  misc_feature 1..23: note = Targeting domain
  source 1..23: mol_type = other RNA
atctagagcaagagatgaactag

SEQ ID NO: 1413 - RNA, 19 nt, synthetic construct
  misc_feature 1..19: note = Targeting domain
  source 1..19: mol_type = other RNA
agagcaagagatgaactag

SEQ ID NO: 1414 - RNA, 23 nt, synthetic construct
  misc_feature 1..23: note = Targeting domain
  source 1..23: mol_type = other RNA
aatgcctgaacaagttttgaaac

SEQ ID NO: 1415 - RNA, 22 nt, synthetic construct
  misc_feature 1..22: note = Targeting domain
  source 1..22: mol_type = other RNA
atgcctgaacaagttttgaaac

SEQ ID NO: 1416 - RNA, 21 nt, synthetic construct
  misc_feature 1..21: note = Targeting domain
  source 1..21: mol_type = other RNA
agattgaggtagaatcaagaa

SEQ ID NO: 1417 - RNA, 19 nt, synthetic construct
  misc_feature 1..19: note = Targeting domain
  source 1..19: mol_type = other RNA
attgaggtagaatcaagaa

SEQ ID NO: 1418 - RNA, 22 nt, synthetic construct
  misc_feature 1..22: note = Targeting domain
  source 1..22: mol_type = other RNA
atgtaagactggagatagagac

SEQ ID NO: 1419 - RNA, 18 nt, synthetic construct
  misc_feature 1..18: note = Targeting domain
  source 1..18: mol_type = other RNA
aagactggagatagagac

SEQ ID NO: 1420 - RNA, 21 nt, synthetic construct
  misc_feature 1..21: note = Targeting domain
  source 1..21: mol_type = other RNA
agtcacatgggagtcacaggg

SEQ ID NO: 1421 - RNA, 19 nt, synthetic construct
  misc_feature 1..19: note = Targeting domain
  source 1..19: mol_type = other RNA
acatatctgtcttccttaa

SEQ ID NO: 1422 - RNA, 24 nt, synthetic construct
  misc_feature 1..24: note = Targeting domain
  source 1..24: mol_type = other RNA
aaatcagatttcatgtgtgaagaa

SEQ ID NO: 1423 - RNA, 23 nt, synthetic construct
  misc_feature 1..23: note = Targeting domain
  source 1..23: mol_type = other RNA
aatcagatttcatgtgtgaagaa

SEQ ID NO: 1424 - RNA, 22 nt, synthetic construct
  misc_feature 1..22: note = Targeting domain
  source 1..22: mol_type = other RNA
atcagatttcatgtgtgaagaa

SEQ ID NO: 1425 - RNA, 19 nt, synthetic construct
  misc_feature 1..19: note = Targeting domain
  source 1..19: mol_type = other RNA
agatttcatgtgtgaagaa

SEQ ID NO: 1426-1430 - skipped (5 entries)

SEQ ID NO: 1431 - RNA, 24 nt, synthetic construct
  misc_feature 1..24: note = Targeting domain
  source 1..24: mol_type = other RNA
aactatttaatttgtttctgtgtg

SEQ ID NO: 1432 - RNA, 23 nt, synthetic construct
  misc_feature 1..23: note = Targeting domain
  source 1..23: mol_type = other RNA
actatttaatttgtttctgtgtg

SEQ ID NO: 1433 - skipped

SEQ ID NO: 1434 - RNA, 24 nt, synthetic construct
  misc_feature 1..24: note = Targeting domain
  source 1..24: mol_type = other RNA
ctgtcaaaagctaccggttacctg

SEQ ID NO: 1435 - skipped

SEQ ID NO: 1436 - RNA, 22 nt, synthetic construct
  misc_feature 1..22: note = CEP290-627 targeting domain (RNA)
  source 1..22: mol_type = other RNA
cttacatcctccttactgccac

SEQ ID NO: 1437 - RNA, 18 nt, synthetic construct
  misc_feature 1..18: note = CEP290-628 targeting domain (RNA)
  source 1..18: mol_type = other RNA
catcctccttactgccac

SEQ ID NO: 1438 - skipped

SEQ ID NO: 1439 - RNA, 18 nt, synthetic construct
  misc_feature 1..18: note = Targeting domain
  source 1..18: mol_type = other RNA
cagggtaggattcatgtt

SEQ ID NO: 1440 - RNA, 22 nt, synthetic construct
  misc_feature 1..22: note = Targeting domain
  source 1..22: mol_type = other RNA
cacagagttcaagctaatacat

SEQ ID NO: 1441 - skipped

SEQ ID NO: 1442 - RNA, 24 nt, synthetic construct
  misc_feature 1..24: note = CEP290-633 targeting domain (RNA)
  source 1..24: mol_type = other RNA
cacgaaaatcagatttcatgtgtg

SEQ ID NO: 1443 - RNA, 22 nt, synthetic construct
  misc_feature 1..22: note = Targeting domain
  source 1..22: mol_type = other RNA
cgaaaatcagatttcatgtgtg

SEQ ID NO: 1444 - RNA, 23 nt, synthetic construct
  misc_feature 1..23: note = Targeting domain
  source 1..23: mol_type = other RNA
ccacaagaatgatcattctaaac

SEQ ID NO: 1445 - RNA, 22 nt, synthetic construct
  misc_feature 1..22: note = Targeting domain
  source 1..22: mol_type = other RNA
cacaagaatgatcattctaaac

SEQ ID NO: 1446 - skipped

SEQ ID NO: 1447 - RNA, 21 nt, synthetic construct
  misc_feature 1..21: note = Targeting domain
  source 1..21: mol_type = other RNA
cggggagtcacatgggagtca

SEQ ID NO: 1448 - RNA, 21 nt, synthetic construct
  misc_feature 1..21: note = Targeting domain
  source 1..21: mol_type = other RNA
cttttgacagtttttaaggcg

SEQ ID NO: 1449 - RNA, 18 nt, synthetic construct
  misc_feature 1..18: note = Targeting domain
  source 1..18: mol_type = other RNA
cattcttgtggcagtaag

SEQ ID NO: 1450 - RNA, 24 nt, synthetic construct
  misc_feature 1..24: note = CEP290-641 targeting domain (RNA)
  source 1..24: mol_type = other RNA
catctagagcaagagatgaactag

SEQ ID NO: 1451 - RNA, 21 nt, synthetic construct
  misc_feature 1..21: note = CEP290-642 targeting domain (RNA)
  source 1..21: mol_type = other RNA
ctagagcaagagatgaactag

SEQ ID NO: 1452 - RNA, 19 nt, synthetic construct
  misc_feature 1..19: note = CEP290-643 targeting domain (RNA)
  source 1..19: mol_type = other RNA
cctgaacaagttttgaaac

SEQ ID NO: 1453 - RNA, 18 nt, synthetic construct
  misc_feature 1..18: note = CEP290-644 targeting domain (RNA)
  source 1..18: mol_type = other RNA
ctgaacaagttttgaaac

SEQ ID NO: 1454 - RNA, 23 nt, synthetic construct
  misc_feature 1..23: note = CEP290-645 targeting domain (RNA)
  source 1..23: mol_type = other RNA
ctctcttccagttgttttgctca

SEQ ID NO: 1455 - RNA, 21 nt, synthetic construct
  misc_feature 1..21: note = Targeting domain
  source 1..21: mol_type = other RNA
ctcttccagttgttttgctca

SEQ ID NO: 1456 - RNA, 19 nt, synthetic construct
  misc_feature 1..19: note = Targeting domain
  source 1..19: mol_type = other RNA
cttccagttgttttgctca

SEQ ID NO: 1457 - RNA, 18 nt, synthetic construct
  misc_feature 1..18: note = Targeting domain
  source 1..18: mol_type = other RNA
cacatgggagtcacaggg

SEQ ID NO: 1458 - RNA, 18 nt, synthetic construct
  misc_feature 1..18: note = Targeting domain
  source 1..18: mol_type = other RNA
catatctgtcttccttaa

SEQ ID NO: 1459 - skipped

SEQ ID NO: 1460 - RNA, 22 nt, synthetic construct
  misc_feature 1..22: note = CEP290-651 targeting domain (RNA)
  source 1..22: mol_type = other RNA
ctatttaatttgtttctgtgtg

SEQ ID NO: 1461 - RNA, 23 nt, synthetic construct
  misc_feature 1..23: note = CEP290-652 targeting domain (RNA)
  source 1..23: mol_type = other RNA
tgtcaaaagctaccggttacctg

SEQ ID NO: 1462 - RNA, 21 nt, synthetic construct
  misc_feature 1..21: note = CEP290-653 targeting domain (RNA)
  source 1..21: mol_type = other RNA
tcaaaagctaccggttacctg

SEQ ID NO: 1463 - RNA, 22 nt, synthetic construct
  misc_feature 1..22: note = Targeting domain
  source 1..22: mol_type = other RNA
tttttaaggcggggagtcacat

SEQ ID NO: 1464 - RNA, 21 nt, synthetic construct
  misc_feature 1..21: note = Targeting domain
  source 1..21: mol_type = other RNA
ttttaaggcggggagtcacat

SEQ ID NO: 1465 - skipped

SEQ ID NO: 1466 - RNA, 19 nt, synthetic construct
  misc_feature 1..19: note = Targeting domain
  source 1..19: mol_type = other RNA
ttaaggcggggagtcacat

SEQ ID NO: 1467 - RNA, 18 nt, synthetic construct
  misc_feature 1..18: note = Targeting domain
  source 1..18: mol_type = other RNA
taaggcggggagtcacat

SEQ ID NO: 1468 - RNA, 23 nt, synthetic construct
  misc_feature 1..23: note = CEP290-659 targeting domain (RNA)
  source 1..23: mol_type = other RNA
tcttacatcctccttactgccac

SEQ ID NO: 1469 - RNA, 21 nt, synthetic construct
  misc_feature 1..21: note = Targeting domain
  source 1..21: mol_type = other RNA
ttacatcctccttactgccac

SEQ ID NO: 1470 - skipped

SEQ ID NO: 1471 - RNA, 21 nt, synthetic construct
  misc_feature 1..21: note = CEP290-662 targeting domain (RNA)
  source 1..21: mol_type = other RNA
tcacagggtaggattcatgtt

SEQ ID NO: 1472 - RNA, 23 nt, synthetic construct
  misc_feature 1..23: note = CEP290-663 targeting domain (RNA)
  source 1..23: mol_type = other RNA
taagatgcagaactagtgtagac

SEQ ID NO: 1473 - RNA, 18 nt, synthetic construct
  misc_feature 1..18: note = CEP290-664 targeting domain (RNA)
  source 1..18: mol_type = other RNA
tgcagaactagtgtagac

SEQ ID NO: 1474 - RNA, 23 nt, synthetic construct
  misc_feature 1..23: note = CEP290-665 targeting domain (RNA)
  source 1..23: mol_type = other RNA
tgttgagtatctcctgtttggca

SEQ ID NO: 1475 - RNA, 21 nt, synthetic construct
  misc_feature 1..21: note = CEP290-666 targeting domain (RNA)
  source 1..21: mol_type = other RNA
ttgagtatctcctgtttggca

SEQ ID NO: 1476 - skipped

SEQ ID NO: 1477 - RNA, 24 nt, synthetic construct
  misc_feature 1..24: note = CEP290-668 targeting domain (RNA)
  source 1..24: mol_type = other RNA
tagcttttgacagtttttaaggcg

SEQ ID NO: 1478 - skipped

SEQ ID NO: 1479 - RNA, 19 nt, synthetic construct
  misc_feature 1..19: note = CEP290-670 targeting domain (RNA)
  source 1..19: mol_type = other RNA
tttgacagtttttaaggcg

SEQ ID NO: 1480 - RNA, 18 nt, synthetic construct
  misc_feature 1..18: note = CEP290-671 targeting domain (RNA)
  source 1..18: mol_type = other RNA
ttgacagtttttaaggcg

SEQ ID NO: 1481 - RNA, 22 nt, synthetic construct
  misc_feature 1..22: note = CEP290-672 targeting domain (RNA)
  source 1..22: mol_type = other RNA
tgatcattcttgtggcagtaag

SEQ ID NO: 1482 - RNA, 19 nt, synthetic construct
  misc_feature 1..19: note = CEP290-673 targeting domain (RNA)
  source 1..19: mol_type = other RNA
tcattcttgtggcagtaag

SEQ ID NO: 1483 - RNA, 22 nt, synthetic construct
  misc_feature 1..22: note = CEP290-674 targeting domain (RNA)
  source 1..22: mol_type = other RNA
tctagagcaagagatgaactag

SEQ ID NO: 1484 - skipped

SEQ ID NO: 1485 - RNA, 24 nt, synthetic construct
  misc_feature 1..24: note = CEP290-676 targeting domain (RNA)
  source 1..24: mol_type = other RNA
taatgcctgaacaagttttgaaac

SEQ ID NO: 1486 - RNA, 21 nt, synthetic construct
  misc_feature 1..21: note = CEP290-677 targeting domain (RNA)
  source 1..21: mol_type = other RNA
tgcctgaacaagttttgaaac

SEQ ID NO: 1487 - RNA, 24 nt, synthetic construct
  misc_feature 1..24: note = CEP290-678 targeting domain (RNA)
  source 1..24: mol_type = other RNA
tgtagattgaggtagaatcaagaa

SEQ ID NO: 1488 - RNA, 22 nt, synthetic construct
  misc_feature 1..22: note = CEP290-679 targeting domain (RNA)
  source 1..22: mol_type = other RNA
tagattgaggtagaatcaagaa

SEQ ID NO: 1489 - RNA, 18 nt, synthetic construct
  misc_feature 1..18: note = CEP290-680 targeting domain (RNA)
  source 1..18: mol_type = other RNA
ttgaggtagaatcaagaa

SEQ ID NO: 1490 - RNA, 21 nt, synthetic construct
  misc_feature 1..21: note = CEP290-681 targeting domain (RNA)
  source 1..21: mol_type = other RNA
tgtaagactggagatagagac

SEQ ID NO: 1491 - RNA, 19 nt, synthetic construct
  misc_feature 1..19: note = CEP290-682 targeting domain (RNA)
  source 1..19: mol_type = other RNA
taagactggagatagagac

SEQ ID NO: 1492 - RNA, 24 nt, synthetic construct
  misc_feature 1..24: note = CEP290-683 targeting domain (RNA)
  source 1..24: mol_type = other RNA
tctctcttccagttgttttgctca

SEQ ID NO: 1493 - RNA, 22 nt, synthetic construct
  misc_feature 1..22: note = CEP290-684 targeting domain (RNA)
  source 1..22: mol_type = other RNA
tctcttccagttgttttgctca

SEQ ID NO: 1494 - skipped

SEQ ID NO: 1495 - RNA, 18 nt, synthetic construct
  misc_feature 1..18: note = CEP290-686 targeting domain (RNA)
  source 1..18: mol_type = other RNA
ttccagttgttttgctca

SEQ ID NO: 1496 - RNA, 19 nt, synthetic construct
  misc_feature 1..19: note = CEP290-687 targeting domain (RNA)
  source 1..19: mol_type = other RNA
tcacatgggagtcacaggg

SEQ ID NO: 1497 - RNA, 24 nt, synthetic construct
  misc_feature 1..24: note = CEP290-688 targeting domain (RNA)
  source 1..24: mol_type = other RNA
tgtttacatatctgtcttccttaa

SEQ ID NO: 1498 - RNA, 22 nt, synthetic construct
  misc_feature 1..22: note = CEP290-689 targeting domain (RNA)
  source 1..22: mol_type = other RNA
tttacatatctgtcttccttaa

SEQ ID NO: 1499 - RNA, 21 nt, synthetic construct
  misc_feature 1..21: note = CEP290-690 targeting domain (RNA)
  source 1..21: mol_type = other RNA
ttacatatctgtcttccttaa

SEQ ID NO: 1500 - skipped

SEQ ID NO: 1501 - RNA, 21 nt, synthetic construct
  misc_feature 1..21: note = Targeting domain
  source 1..21: mol_type = other RNA
tcagatttcatgtgtgaagaa

SEQ ID NO: 1502 - skipped

SEQ ID NO: 1503 - RNA, 21 nt, synthetic construct
  misc_feature 1..21: note = CEP290-694 targeting domain (RNA)
  source 1..21: mol_type = other RNA
tatttaatttgtttctgtgtg

SEQ ID NO: 1504 - RNA, 19 nt, synthetic construct
  misc_feature 1..19: note = CEP290-695 targeting domain (RNA)
  source 1..19: mol_type = other RNA
tttaatttgtttctgtgtg

SEQ ID NO: 1505 - RNA, 18 nt, synthetic construct
  misc_feature 1..18: note = CEP290-696 targeting domain (RNA)
  source 1..18: mol_type = other RNA
ttaatttgtttctgtgtg

SEQ ID NO: 1506 - RNA, 21 nt, synthetic construct
  misc_feature 1..21: note = CEP290-697 targeting domain (RNA)
  source 1..21: mol_type = other RNA
gtagaataaatttatttaatg

SEQ ID NO: 1507 - RNA, 18 nt, synthetic construct
  misc_feature 1..18: note = CEP290-495 targeting domain (RNA)
  source 1..18: mol_type = other RNA
gaataaatttatttaatg

SEQ ID NO: 1508 - RNA, 23 nt, synthetic construct
  misc_feature 1..23: note = CEP290-698 targeting domain (RNA)
  source 1..23: mol_type = other RNA
gagaaaaaggagcatgaaacagg

SEQ ID NO: 1509 - RNA, 21 nt, synthetic construct
  misc_feature 1..21: note = CEP290-699 targeting domain (RNA)
  source 1..21: mol_type = other RNA
gaaaaaggagcatgaaacagg

SEQ ID NO: 1510 - RNA, 22 nt, synthetic construct
  misc_feature 1..22: note = CEP290-700 targeting domain (RNA)
  source 1..22: mol_type = other RNA
gtagaataaaaaataaaaaaac

SEQ ID NO: 1511 - RNA, 19 nt, synthetic construct
  misc_feature 1..19: note = CEP290-701 targeting domain (RNA)
  source 1..19: mol_type = other RNA
gaataaaaaataaaaaaac

SEQ ID NO: 1512 - RNA, 24 nt, synthetic construct
  misc_feature 1..24: note = CEP290-702 targeting domain (RNA)
  source 1..24: mol_type = other RNA
gaataaaaaataaaaaaactagag

SEQ ID NO: 1513 - RNA, 20 nt, synthetic construct
  misc_feature 1..20: note = CEP290-508 targeting domain (RNA)
  source 1..20: mol_type = other RNA
gaaatagatgtagattgagg

SEQ ID NO: 1514 - RNA, 21 nt, synthetic construct
  misc_feature 1..21: note = CEP290-703 targeting domain (RNA)
  source 1..21: mol_type = other RNA
gataataaggaaatacaaaaa

SEQ ID NO: 1515 - RNA, 23 nt, synthetic construct
  misc_feature 1..23: note = CEP290-704 targeting domain (RNA)
  source 1..23: mol_type = other RNA
gtgttgcccaggctggagtgcag

SEQ ID NO: 1516 - RNA, 21 nt, synthetic construct
  misc_feature 1..21: note = CEP290-705 targeting domain (RNA)
  source 1..21: mol_type = other RNA
gttgcccaggctggagtgcag

SEQ ID NO: 1517 - RNA, 18 nt, synthetic construct
  misc_feature 1..18: note = CEP290-706 targeting domain (RNA)
  source 1..18: mol_type = other RNA
gcccaggctggagtgcag

SEQ ID NO: 1518 - RNA, 19 nt, synthetic construct
  misc_feature 1..19: note = CEP290-707 targeting domain (RNA)
  source 1..19: mol_type = other RNA
gttgtttttttttttgaaa

SEQ ID NO: 1519 - RNA, 23 nt, synthetic construct
  misc_feature 1..23: note = CEP290-708 targeting domain (RNA)
  source 1..23: mol_type = other RNA
gagtctcactgtgttgcccaggc

SEQ ID NO: 1520 - RNA, 21 nt, synthetic construct
  misc_feature 1..21: note = CEP290-709 targeting domain (RNA)
  source 1..21: mol_type = other RNA
gtctcactgtgttgcccaggc

SEQ ID NO: 1521 - RNA, 24 nt, synthetic construct
  misc_feature 1..24: note = CEP290-710 targeting domain (RNA)
  source 1..24: mol_type = other RNA
aatgtagaataaatttatttaatg

SEQ ID NO: 1522 - RNA, 23 nt, synthetic construct
  misc_feature 1..23: note = CEP290-711 targeting domain (RNA)
  source 1..23: mol_type = other RNA
atgtagaataaatttatttaatg

SEQ ID NO: 1523 - RNA, 19 nt, synthetic construct
  misc_feature 1..19: note = CEP290-712 targeting domain (RNA)
  source 1..19: mol_type = other RNA
agaataaatttatttaatg

SEQ ID NO: 1524 - RNA, 24 nt, synthetic construct
  misc_feature 1..24: note = CEP290-713 targeting domain (RNA)
  source 1..24: mol_type = other RNA
atttattctacaataaaaaatgat

SEQ ID NO: 1525 - RNA, 20 nt, synthetic construct
  misc_feature 1..20: note = Targeting domain
  source 1..20: mol_type = other RNA
attctacaataaaaaatgat

SEQ ID NO: 1526 - RNA, 24 nt, synthetic construct
  misc_feature 1..24: note = CEP290-715 targeting domain (RNA)
  source 1..24: mol_type = other RNA
agagaaaaaggagcatgaaacagg

SEQ ID NO: 1527 - RNA, 22 nt, synthetic construct
  misc_feature 1..22: note = CEP290-716 targeting domain (RNA)
  source 1..22: mol_type = other RNA
agaaaaaggagcatgaaacagg

SEQ ID NO: 1528 - RNA, 20 nt, synthetic construct
  misc_feature 1..20: note = Targeting domain
  source 1..20: mol_type = other RNA
aaaaaggagcatgaaacagg

SEQ ID NO: 1529 - RNA, 19 nt, synthetic construct
  misc_feature 1..19: note = Targeting domain
  source 1..19: mol_type = other RNA
aaaaggagcatgaaacagg

SEQ ID NO: 1530 - RNA, 18 nt, synthetic construct
  misc_feature 1..18: note = Targeting domain
  source 1..18: mol_type = other RNA
aaaggagcatgaaacagg

SEQ ID NO: 1531 - RNA, 24 nt, synthetic construct
  misc_feature 1..24: note = CEP290-720 targeting domain (RNA)
  source 1..24: mol_type = other RNA
acaataaaaaatgatgagaattta

SEQ ID NO: 1532 - RNA, 22 nt, synthetic construct
  misc_feature 1..22: note = Targeting domain
  source 1..22: mol_type = other RNA
aataaaaaatgatgagaattta

SEQ ID NO: 1533 - RNA, 21 nt, synthetic construct
  misc_feature 1..21: note = Targeting domain
  source 1..21: mol_type = other RNA
ataaaaaatgatgagaattta

SEQ ID NO: 1534 - RNA, 19 nt, synthetic construct
  misc_feature 1..19: note = Targeting domain
  source 1..19: mol_type = other RNA
aaaaaatgatgagaattta

SEQ ID NO: 1535 - RNA, 18 nt, synthetic construct
  misc_feature 1..18: note = Targeting domain
  source 1..18: mol_type = other RNA
aaaaatgatgagaattta

SEQ ID NO: 1536 - RNA, 24 nt, synthetic construct
  misc_feature 1..24: note = Targeting domain
  source 1..24: mol_type = other RNA
atgtagaataaaaaataaaaaaac

SEQ ID NO: 1537 - RNA, 20 nt, synthetic construct
  misc_feature 1..20: note = Targeting domain
  source 1..20: mol_type = other RNA
agaataaaaaataaaaaaac

SEQ ID NO: 1538 - RNA, 18 nt, synthetic construct
  misc_feature 1..18: note = Targeting domain
  source 1..18: mol_type = other RNA
aataaaaaataaaaaaac

SEQ ID NO: 1539 - RNA, 23 nt, synthetic construct
  misc_feature 1..23: note = CEP290-728 targeting domain (RNA)
  source 1..23: mol_type = other RNA
aataaaaaataaaaaaactagag

SEQ ID NO: 1540 - RNA, 22 nt, synthetic construct
  misc_feature 1..22: note = Targeting domain
  source 1..22: mol_type = other RNA
ataaaaaataaaaaaactagag

SEQ ID NO: 1541 - RNA, 20 nt, synthetic construct
  misc_feature 1..20: note = Targeting domain
  source 1..20: mol_type = other RNA
aaaaaataaaaaaactagag

SEQ ID NO: 1542 - RNA, 19 nt, synthetic construct
  misc_feature 1..19: note = Targeting domain
  source 1..19: mol_type = other RNA
aaaaataaaaaaactagag

SEQ ID NO: 1543 - RNA, 18 nt, synthetic construct
  misc_feature 1..18: note = Targeting domain
  source 1..18: mol_type = other RNA
aaaataaaaaaactagag

SEQ ID NO: 1544 - RNA, 23 nt, synthetic construct
  misc_feature 1..23: note = Targeting domain
  source 1..23: mol_type = other RNA
caataaaaaatgatgagaattta

SEQ ID NO: 1545 - RNA, 22 nt, synthetic construct
  misc_feature 1..22: note = Targeting domain
  source 1..22: mol_type = other RNA
tgtagaataaatttatttaatg

SEQ ID NO: 1546 - RNA, 20 nt, synthetic construct
  misc_feature 1..20: note = Targeting domain
  source 1..20: mol_type = other RNA
tagaataaatttatttaatg

SEQ ID NO: 1547 - RNA, 23 nt, synthetic construct
  misc_feature 1..23: note = Targeting domain
  source 1..23: mol_type = other RNA
tttattctacaataaaaaatgat

SEQ ID NO: 1548 - RNA, 22 nt, synthetic construct
  misc_feature 1..22: note = Targeting domain
  source 1..22: mol_type = other RNA
ttattctacaataaaaaatgat

SEQ ID NO: 1549 - RNA, 21 nt, synthetic construct
  misc_feature 1..21: note = Targeting domain
  source 1..21: mol_type = other RNA
tattctacaataaaaaatgat

SEQ ID NO: 1550 - RNA, 19 nt, synthetic construct
  misc_feature 1..19: note = Targeting domain
  source 1..19: mol_type = other RNA
ttctacaataaaaaatgat

SEQ ID NO: 1551 - RNA, 18 nt, synthetic construct
  misc_feature 1..18: note = Targeting domain
  source 1..18: mol_type = other RNA
tctacaataaaaaatgat

SEQ ID NO: 1552 - RNA, 20 nt, synthetic construct
  misc_feature 1..20: note = Targeting domain
  source 1..20: mol_type = other RNA
taaaaaatgatgagaattta

SEQ ID NO: 1553 - RNA, 23 nt, synthetic construct
  misc_feature 1..23: note = Targeting domain
  source 1..23: mol_type = other RNA
tgtagaataaaaaataaaaaaac

SEQ ID NO: 1554 - RNA, 21 nt, synthetic construct
  misc_feature 1..21: note = Targeting domain
  source 1..21: mol_type = other RNA
tagaataaaaaataaaaaaac

SEQ ID NO: 1555 - RNA, 21 nt, synthetic construct
  misc_feature 1..21: note = Targeting domain
  source 1..21: mol_type = other RNA
taaaaaataaaaaaactagag

SEQ ID NO: 1556 - RNA, 24 nt, synthetic construct
  misc_feature 1..24: note = Targeting domain
  source 1..24: mol_type = other RNA
aaaagaaatagatgtagattgagg

SEQ ID NO: 1557 - RNA, 23 nt, synthetic construct
  misc_feature 1..23: note = Targeting domain
  source 1..23: mol_type = other RNA
aaagaaatagatgtagattgagg

SEQ ID NO: 1558 - RNA, 22 nt, synthetic construct
  misc_feature 1..22: note = Targeting domain
  source 1..22: mol_type = other RNA
aagaaatagatgtagattgagg

SEQ ID NO: 1559 - RNA, 21 nt, synthetic construct
  misc_feature 1..21: note = Targeting domain
  source 1..21: mol_type = other RNA
agaaatagatgtagattgagg

SEQ ID NO: 1560 - RNA, 19 nt, synthetic construct
  misc_feature 1..19: note = Targeting domain
  source 1..19: mol_type = other RNA
aaatagatgtagattgagg

SEQ ID NO: 1561 - RNA, 18 nt, synthetic construct
  misc_feature 1..18: note = Targeting domain
  source 1..18: mol_type = other RNA
aatagatgtagattgagg

SEQ ID NO: 1562 - RNA, 24 nt, synthetic construct
  misc_feature 1..24: note = Targeting domain
  source 1..24: mol_type = other RNA
ataataaggaaatacaaaaactgg

SEQ ID NO: 1563 - RNA, 22 nt, synthetic construct
  misc_feature 1..22: note = Targeting domain
  source 1..22: mol_type = other RNA
aataaggaaatacaaaaactgg

SEQ ID NO: 1564 - RNA, 21 nt, synthetic construct
  misc_feature 1..21: note = Targeting domain
  source 1..21: mol_type = other RNA
ataaggaaatacaaaaactgg

SEQ ID NO: 1565 - RNA, 19 nt, synthetic construct
  misc_feature 1..19: note = Targeting domain
  source 1..19: mol_type = other RNA
aaggaaatacaaaaactgg

SEQ ID NO: 1566 - RNA, 18 nt, synthetic construct
  misc_feature 1..18: note = Targeting domain
  source 1..18: mol_type = other RNA
aggaaatacaaaaactgg

SEQ ID NO: 1567 - RNA, 24 nt, synthetic construct
  misc_feature 1..24: note = Targeting domain
  source 1..24: mol_type = other RNA
atagataataaggaaatacaaaaa

SEQ ID NO: 1568 - RNA, 22 nt, synthetic construct
  misc_feature 1..22: note = Targeting domain
  source 1..22: mol_type = other RNA
agataataaggaaatacaaaaa

SEQ ID NO: 1569 - RNA, 20 nt, synthetic construct
  misc_feature 1..20: note = Targeting domain
  source 1..20: mol_type = other RNA
ataataaggaaatacaaaaa

SEQ ID NO: 1570 - RNA, 18 nt, synthetic construct
  misc_feature 1..18: note = Targeting domain
  source 1..18: mol_type = other RNA
aataaggaaatacaaaaa

SEQ ID NO: 1571 - RNA, 20 nt, synthetic construct
  misc_feature 1..20: note = Targeting domain
  source 1..20: mol_type = other RNA
aaaaaaaaaaacaacaaaaa

SEQ ID NO: 1572 - RNA, 19 nt, synthetic construct
  misc_feature 1..19: note = Targeting domain
  source 1..19: mol_type = other RNA
aaaaaaaaaacaacaaaaa

SEQ ID NO: 1573 - RNA, 18 nt, synthetic construct
  misc_feature 1..18: note = Targeting domain
  source 1..18: mol_type = other RNA
aaaaaaaaacaacaaaaa

SEQ ID NO: 1574 - RNA, 24 nt, synthetic construct
  misc_feature 1..24: note = Targeting domain
  source 1..24: mol_type = other RNA
agagtctcactgtgttgcccaggc

SEQ ID NO: 1575 - RNA, 22 nt, synthetic construct
  misc_feature 1..22: note = Targeting domain
  source 1..22: mol_type = other RNA
agtctcactgtgttgcccaggc

SEQ ID NO: 1576 - RNA, 21 nt, synthetic construct
  misc_feature 1..21: note = Targeting domain
  source 1..21: mol_type = other RNA
caaaaaaaaaaacaacaaaaa

SEQ ID NO: 1577 - RNA, 19 nt, synthetic construct
  misc_feature 1..19: note = Targeting domain
  source 1..19: mol_type = other RNA
ctcactgtgttgcccaggc

SEQ ID NO: 1578 - RNA, 23 nt, synthetic construct
  misc_feature 1..23: note = Targeting domain
  source 1..23: mol_type = other RNA
taataaggaaatacaaaaactgg

SEQ ID NO: 1579 - RNA, 20 nt, synthetic construct
  misc_feature 1..20: note = Targeting domain
  source 1..20: mol_type = other RNA
taaggaaatacaaaaactgg

SEQ ID NO: 1580 - RNA, 23 nt, synthetic construct
  misc_feature 1..23: note = CEP290-769 targeting domain (RNA)
  source 1..23: mol_type = other RNA
tagataataaggaaatacaaaaa

SEQ ID NO: 1581 - RNA, 19 nt, synthetic construct
  misc_feature 1..19: note = Targeting domain
  source 1..19: mol_type = other RNA
taataaggaaatacaaaaa

SEQ ID NO: 1582 - RNA, 24 nt, synthetic construct
  misc_feature 1..24: note = Targeting domain
  source 1..24: mol_type = other RNA
tgtgttgcccaggctggagtgcag

SEQ ID NO: 1583 - RNA, 22 nt, synthetic construct
  misc_feature 1..22: note = CEP290-772 targeting domain (RNA)
  source 1..22: mol_type = other RNA
tgttgcccaggctggagtgcag

SEQ ID NO: 1584 - skipped

SEQ ID NO: 1585 - RNA, 19 nt, synthetic construct
  misc_feature 1..19: note = Targeting domain
  source 1..19: mol_type = other RNA
tgcccaggctggagtgcag

SEQ ID NO: 1586 - RNA, 24 nt, synthetic construct
  misc_feature 1..24: note = Targeting domain
  source 1..24: mol_type = other RNA
tttcaaaaaaaaaaacaacaaaaa

SEQ ID NO: 1587 - RNA, 23 nt, synthetic construct
  misc_feature 1..23: note = Targeting domain
  source 1..23: mol_type = other RNA
ttcaaaaaaaaaaacaacaaaaa

SEQ ID NO: 1588 - RNA, 22 nt, synthetic construct
  misc_feature 1..22: note = Targeting domain
  source 1..22: mol_type = other RNA
tcaaaaaaaaaaacaacaaaaa

SEQ ID NO: 1589 - RNA, 24 nt, synthetic construct
  misc_feature 1..24: note = Targeting domain
  source 1..24: mol_type = other RNA
tttttgttgtttttttttttgaaa

SEQ ID NO: 1590 - RNA, 23 nt, synthetic construct
  misc_feature 1..23: note = Targeting domain
  source 1..23: mol_type = other RNA
ttttgttgtttttttttttgaaa

SEQ ID NO: 1591 - RNA, 22 nt, synthetic construct
  misc_feature 1..22: note = Targeting domain
  source 1..22: mol_type = other RNA
tttgttgtttttttttttgaaa

SEQ ID NO: 1592 - RNA, 21 nt, synthetic construct
  misc_feature 1..21: note = Targeting domain
  source 1..21: mol_type = other RNA
ttgttgtttttttttttgaaa

SEQ ID NO: 1593 - RNA, 20 nt, synthetic construct
  misc_feature 1..20: note = Targeting domain
  source 1..20: mol_type = other RNA
tgttgtttttttttttgaaa

SEQ ID NO: 1594 - RNA, 18 nt, synthetic construct
  misc_feature 1..18: note = Targeting domain
  source 1..18: mol_type = other RNA
ttgtttttttttttgaaa

SEQ ID NO: 1595 - skipped

SEQ ID NO: 1596 - RNA, 18 nt, synthetic construct
  misc_feature 1..18: note = CEP290-785 targeting domain (RNA)
  source 1..18: mol_type = other RNA
tcactgtgttgcccaggc

SEQ ID NO: 1597 - RNA, 21 nt, synthetic construct
  misc_feature 1..21: note = CEP290-786 targeting domain (RNA)
  source 1..21: mol_type = other RNA
actgttggctacatccattcc

SEQ ID NO: 1598 - RNA, 24 nt, synthetic construct
  misc_feature 1..24: note = CEP290-787 targeting domain (RNA)
  source 1..24: mol_type = other RNA
aatttacagagtgcatccatggtc

SEQ ID NO: 1599 - RNA, 23 nt, synthetic construct
  misc_feature 1..23: note = CEP290-788 targeting domain (RNA)
  source 1..23: mol_type = other RNA
atttacagagtgcatccatggtc

SEQ ID NO: 1600 - RNA, 19 nt, synthetic construct
  misc_feature 1..19: note = CEP290-789 targeting domain (RNA)
  source 1..19: mol_type = other RNA
acagagtgcatccatggtc

SEQ ID NO: 1601 - skipped

SEQ ID NO: 1602 - RNA, 21 nt, synthetic construct
  misc_feature 1..21: note = Targeting domain
  source 1..21: mol_type = other RNA
atggtccctggcttttgttcc

SEQ ID NO: 1603 - RNA, 19 nt, synthetic construct
  misc_feature 1..19: note = Targeting domain
  source 1..19: mol_type = other RNA
atagagacacattcagtaa

SEQ ID NO: 1604 - RNA, 24 nt, synthetic construct
  misc_feature 1..24: note = Targeting domain
  source 1..24: mol_type = other RNA
agctcaaaagcttttgctggctca

SEQ ID NO: 1605 - RNA, 19 nt, synthetic construct
  misc_feature 1..19: note = Targeting domain
  source 1..19: mol_type = other RNA
aaaagcttttgctggctca

SEQ ID NO: 1606 - RNA, 18 nt, synthetic construct
  misc_feature 1..18: note = Targeting domain
  source 1..18: mol_type = other RNA
aaagcttttgctggctca

SEQ ID NO: 1607 - RNA, 24 nt, synthetic construct
  misc_feature 1..24: note = Targeting domain
  source 1..24: mol_type = other RNA
aatccataagcctctatttctgat

SEQ ID NO: 1608 - RNA, 23 nt, synthetic construct
  misc_feature 1..23: note = Targeting domain
  source 1..23: mol_type = other RNA
atccataagcctctatttctgat

SEQ ID NO: 1609 - RNA, 19 nt, synthetic construct
  misc_feature 1..19: note = Targeting domain
  source 1..19: mol_type = other RNA
ataagcctctatttctgat

SEQ ID NO: 1610 - RNA, 23 nt, synthetic construct
  misc_feature 1..23: note = Targeting domain
  source 1..23: mol_type = other RNA
agctaaatcatgcaagtgaccta

SEQ ID NO: 1611 - RNA, 19 nt, synthetic construct
  misc_feature 1..19: note = Targeting domain
  source 1..19: mol_type = other RNA
aaatcatgcaagtgaccta

SEQ ID NO: 1612 - RNA, 18 nt, synthetic construct
  misc_feature 1..18: note = Targeting domain
  source 1..18: mol_type = other RNA
aatcatgcaagtgaccta

SEQ ID NO: 1613 - RNA, 23 nt, synthetic construct
  misc_feature 1..23: note = Targeting domain
  source 1..23: mol_type = other RNA
aaacctcttttaaccagacatct

SEQ ID NO: 1614 - RNA, 22 nt, synthetic construct
  misc_feature 1..22: note = Targeting domain
  source 1..22: mol_type = other RNA
aacctcttttaaccagacatct

SEQ ID NO: 1615 - RNA, 21 nt, synthetic construct
  misc_feature 1..21: note = Targeting domain
  source 1..21: mol_type = other RNA
acctcttttaaccagacatct

SEQ ID NO: 1616 - RNA, 24 nt, synthetic construct
  misc_feature 1..24: note = Targeting domain
  source 1..24: mol_type = other RNA
agtttgttctgggtacaggggtaa

SEQ ID NO: 1617 - RNA, 24 nt, synthetic construct
  misc_feature 1..24: note = Targeting domain
  source 1..24: mol_type = other RNA
atgactcataatttagtaggaatc

SEQ ID NO: 1618 - RNA, 21 nt, synthetic construct
  misc_feature 1..21: note = Targeting domain
  source 1..21: mol_type = other RNA
actcataatttagtaggaatc

SEQ ID NO: 1619 - RNA, 21 nt, synthetic construct
  misc_feature 1..21: note = Targeting domain
  source 1..21: mol_type = other RNA
aatggatgtagccaacagtag

SEQ ID NO: 1620 - RNA, 20 nt, synthetic construct
  misc_feature 1..20: note = Targeting domain
  source 1..20: mol_type = other RNA
atggatgtagccaacagtag

SEQ ID NO: 1621 - RNA, 24 nt, synthetic construct
  misc_feature 1..24: note = Targeting domain
  source 1..24: mol_type = other RNA
atcacctctctttggcaaaagcag

SEQ ID NO: 1622 - RNA, 21 nt, synthetic construct
  misc_feature 1..21: note = Targeting domain
  source 1..21: mol_type = other RNA
acctctctttggcaaaagcag

SEQ ID NO: 1623 - RNA, 23 nt, synthetic construct
  misc_feature 1..23: note = Targeting domain
  source 1..23: mol_type = other RNA
aggtagaatattgtaatcaaagg

SEQ ID NO: 1624 - RNA, 19 nt, synthetic construct
  misc_feature 1..19: note = Targeting domain
  source 1..19: mol_type = other RNA
agaatattgtaatcaaagg

SEQ ID NO: 1625 - RNA, 21 nt, synthetic construct
  misc_feature 1..21: note = Targeting domain
  source 1..21: mol_type = other RNA
aaggaacaaaagccagggacc

SEQ ID NO: 1626 - RNA, 20 nt, synthetic construct
  misc_feature 1..20: note = Targeting domain
  source 1..20: mol_type = other RNA
aggaacaaaagccagggacc

SEQ ID NO: 1627 - RNA, 24 nt, synthetic construct
  misc_feature 1..24: note = Targeting domain
  source 1..24: mol_type = other RNA
acatccattccaaggaacaaaagc

SEQ ID NO: 1628 - RNA, 22 nt, synthetic construct
  misc_feature 1..22: note = Targeting domain
  source 1..22: mol_type = other RNA
atccattccaaggaacaaaagc

SEQ ID NO: 1629 - RNA, 18 nt, synthetic construct
  misc_feature 1..18: note = Targeting domain
  source 1..18: mol_type = other RNA
attccaaggaacaaaagc

SEQ ID NO: 1630 - RNA, 24 nt, synthetic construct
  misc_feature 1..24: note = Targeting domain
  source 1..24: mol_type = other RNA
agaattagatcttattctactcct

SEQ ID NO: 1631 - RNA, 22 nt, synthetic construct
  misc_feature 1..22: note = Targeting domain
  source 1..22: mol_type = other RNA
aattagatcttattctactcct

SEQ ID NO: 1632 - RNA, 21 nt, synthetic construct
  misc_feature 1..21: note = Targeting domain
  source 1..21: mol_type = other RNA
attagatcttattctactcct

SEQ ID NO: 1633 - RNA, 18 nt, synthetic construct
  misc_feature 1..18: note = Targeting domain
  source 1..18: mol_type = other RNA
agatcttattctactcct

SEQ ID NO: 1634 - RNA, 19 nt, synthetic construct
  misc_feature 1..19: note = Targeting domain
  source 1..19: mol_type = other RNA
atttgttcatcttcctcat

SEQ ID NO: 1635 - RNA, 23 nt, synthetic construct
  misc_feature 1..23: note = Targeting domain
  source 1..23: mol_type = other RNA
agaggtgattatgttacttttta

SEQ ID NO: 1636 - RNA, 21 nt, synthetic construct
  misc_feature 1..21: note = Targeting domain
  source 1..21: mol_type = other RNA
aggtgattatgttacttttta

SEQ ID NO: 1637 - RNA, 24 nt, synthetic construct
  misc_feature 1..24: note = Targeting domain
  source 1..24: mol_type = other RNA
aacctcttttaaccagacatctaa

SEQ ID NO: 1638 - RNA, 23 nt, synthetic construct
  misc_feature 1..23: note = Targeting domain
  source 1..23: mol_type = other RNA
acctcttttaaccagacatctaa

SEQ ID NO: 1639 - RNA, 22 nt, synthetic construct
  misc_feature 1..22: note = Targeting domain
  source 1..22: mol_type = other RNA
ataaacatgactcataatttag

SEQ ID NO: 1640 - skipped

SEQ ID NO: 1641 - RNA, 19 nt, synthetic construct
  misc_feature 1..19: note = Targeting domain
  source 1..19: mol_type = other RNA
aacatgactcataatttag

SEQ ID NO: 1642 - RNA, 18 nt, synthetic construct
  misc_feature 1..18: note = Targeting domain
  source 1..18: mol_type = other RNA
acatgactcataatttag

SEQ ID NO: 1643 - RNA, 24 nt, synthetic construct
  misc_feature 1..24: note = Targeting domain
  source 1..24: mol_type = other RNA
acaggtagaatattgtaatcaaag

SEQ ID NO: 1644 - RNA, 22 nt, synthetic construct
  misc_feature 1..22: note = Targeting domain
  source 1..22: mol_type = other RNA
aggtagaatattgtaatcaaag

SEQ ID NO: 1645 - RNA, 18 nt, synthetic construct
  misc_feature 1..18: note = Targeting domain
  source 1..18: mol_type = other RNA
agaatattgtaatcaaag

SEQ ID NO: 1646 - RNA, 24 nt, synthetic construct
  misc_feature 1..24: note = Targeting domain
  source 1..24: mol_type = other RNA
atagtttgttctgggtacaggggt

SEQ ID NO: 1647 - RNA, 22 nt, synthetic construct
  misc_feature 1..22: note = Targeting domain
  source 1..22: mol_type = other RNA
agtttgttctgggtacaggggt

SEQ ID NO: 1648 - RNA, 23 nt, synthetic construct
  misc_feature 1..23: note = Targeting domain
  source 1..23: mol_type = other RNA
agacatctaagagaaaaaggagc

SEQ ID NO: 1649 - RNA, 21 nt, synthetic construct
  misc_feature 1..21: note = Targeting domain
  source 1..21: mol_type = other RNA
acatctaagagaaaaaggagc

SEQ ID NO: 1650 - RNA, 19 nt, synthetic construct
  misc_feature 1..19: note = Targeting domain
  source 1..19: mol_type = other RNA
atctaagagaaaaaggagc

SEQ ID NO: 1651 - skipped

SEQ ID NO: 1652 - RNA, 18 nt, synthetic construct
  misc_feature 1..18: note = Targeting domain
  source 1..18: mol_type = other RNA
aggataggacagaggaca

SEQ ID NO: 1653 - RNA, 22 nt, synthetic construct
  misc_feature 1..22: note = Targeting domain
  source 1..22: mol_type = other RNA
aggaaagatgaaaaatactctt

SEQ ID NO: 1654 - RNA, 19 nt, synthetic construct
  misc_feature 1..19: note = Targeting domain
  source 1..19: mol_type = other RNA
aaagatgaaaaatactctt

SEQ ID NO: 1655 - RNA, 18 nt, synthetic construct
  misc_feature 1..18: note = Targeting domain
  source 1..18: mol_type = other RNA
aagatgaaaaatactctt

SEQ ID NO: 1656 - RNA, 23 nt, synthetic construct
  misc_feature 1..23: note = Targeting domain
  source 1..23: mol_type = other RNA
aggaaagatgaaaaatactcttt

SEQ ID NO: 1657 - skipped

SEQ ID NO: 1658 - RNA, 19 nt, synthetic construct
  misc_feature 1..19: note = Targeting domain
  source 1..19: mol_type = other RNA
aagatgaaaaatactcttt

SEQ ID NO: 1659 - RNA, 18 nt, synthetic construct
  misc_feature 1..18: note = Targeting domain
  source 1..18: mol_type = other RNA
agatgaaaaatactcttt

SEQ ID NO: 1660 - RNA, 21 nt, synthetic construct
  misc_feature 1..21: note = Targeting domain
  source 1..21: mol_type = other RNA
aggaaagatgaaaaatactct

SEQ ID NO: 1661 - RNA, 18 nt, synthetic construct
  misc_feature 1..18: note = Targeting domain
  source 1..18: mol_type = other RNA
aaagatgaaaaatactct

SEQ ID NO: 1662 - RNA, 22 nt, synthetic construct
  misc_feature 1..22: note = Targeting domain
  source 1..22: mol_type = other RNA
ataggacagaggacatggagaa

SEQ ID NO: 1663 - skipped

SEQ ID NO: 1664 - RNA, 24 nt, synthetic construct
  misc_feature 1..24: note = Targeting domain
  source 1..24: mol_type = other RNA
aggataggacagaggacatggaga

SEQ ID NO: 1665 - RNA, 21 nt, synthetic construct
  misc_feature 1..21: note = Targeting domain
  source 1..21: mol_type = other RNA
ataggacagaggacatggaga

SEQ ID NO: 1666 - RNA, 19 nt, synthetic construct
  misc_feature 1..19: note = Targeting domain
  source 1..19: mol_type = other RNA
aggacagaggacatggaga

SEQ ID NO: 1667 - RNA, 23 nt, synthetic construct
  misc_feature 1..23: note = Targeting domain
  source 1..23: mol_type = other RNA
aaggaacaaaagccagggaccat

SEQ ID NO: 1668 - RNA, 22 nt, synthetic construct
  misc_feature 1..22: note = Targeting domain
  source 1..22: mol_type = other RNA
aggaacaaaagccagggaccat

SEQ ID NO: 1669 - RNA, 19 nt, synthetic construct
  misc_feature 1..19: note = Targeting domain
  source 1..19: mol_type = other RNA
aacaaaagccagggaccat

SEQ ID NO: 1670 - RNA, 18 nt, synthetic construct
  misc_feature 1..18: note = Targeting domain
  source 1..18: mol_type = other RNA
acaaaagccagggaccat

SEQ ID NO: 1671 - RNA, 24 nt, synthetic construct
  misc_feature 1..24: note = Targeting domain
  source 1..24: mol_type = other RNA
acatttattctacaataaaaaatg

SEQ ID NO: 1672 - RNA, 22 nt, synthetic construct
  misc_feature 1..22: note = Targeting domain
  source 1..22: mol_type = other RNA
atttattctacaataaaaaatg

SEQ ID NO: 1673 - RNA, 18 nt, synthetic construct
  misc_feature 1..18: note = Targeting domain
  source 1..18: mol_type = other RNA
attctacaataaaaaatg

SEQ ID NO: 1674 - RNA, 24 nt, synthetic construct
  misc_feature 1..24: note = Targeting domain
  source 1..24: mol_type = other RNA
attgtgtgtgtgtgtgtgtgttat

SEQ ID NO: 1675 - RNA, 23 nt, synthetic construct
  misc_feature 1..23: note = Targeting domain
  source 1..23: mol_type = other RNA
ctactgttggctacatccattcc

SEQ ID NO: 1676 - RNA, 20 nt, synthetic construct
  misc_feature 1..20: note = Targeting domain
  source 1..20: mol_type = other RNA
ctgttggctacatccattcc

SEQ ID NO: 1677 - RNA, 18 nt, synthetic construct
  misc_feature 1..18: note = Targeting domain
  source 1..18: mol_type = other RNA
cagagtgcatccatggtc

SEQ ID NO: 1678 - RNA, 24 nt, synthetic construct
  misc_feature 1..24: note = Targeting domain
  source 1..24: mol_type = other RNA
ctccagcattagaaagtcctaggc

SEQ ID NO: 1679 - RNA, 22 nt, synthetic construct
  misc_feature 1..22: note = Targeting domain
  source 1..22: mol_type = other RNA
ccagcattagaaagtcctaggc

SEQ ID NO: 1680 - RNA, 21 nt, synthetic construct
  misc_feature 1..21: note = Targeting domain
  source 1..21: mol_type = other RNA
cagcattagaaagtcctaggc

SEQ ID NO: 1681 - RNA, 18 nt, synthetic construct
  misc_feature 1..18: note = Targeting domain
  source 1..18: mol_type = other RNA
cattagaaagtcctaggc

SEQ ID NO: 1682 - RNA, 24 nt, synthetic construct
  misc_feature 1..24: note = Targeting domain
  source 1..24: mol_type = other RNA
cccatggtccctggcttttgttcc

SEQ ID NO: 1683 - RNA, 23 nt, synthetic construct
  misc_feature 1..23: note = Targeting domain
  source 1..23: mol_type = other RNA
ccatggtccctggcttttgttcc

SEQ ID NO: 1684 - RNA, 22 nt, synthetic construct
  misc_feature 1..22: note = Targeting domain
  source 1..22: mol_type = other RNA
catggtccctggcttttgttcc

SEQ ID NO: 1685 - RNA, 22 nt, synthetic construct
  misc_feature 1..22: note = Targeting domain
  source 1..22: mol_type = other RNA
ctcatagagacacattcagtaa

SEQ ID NO: 1686 - skipped

SEQ ID NO: 1687 - RNA, 22 nt, synthetic construct
  misc_feature 1..22: note = Targeting domain
  source 1..22: mol_type = other RNA
ctcaaaagcttttgctggctca

SEQ ID NO: 1688 - skipped

SEQ ID NO: 1689 - RNA, 21 nt, synthetic construct
  misc_feature 1..21: note = Targeting domain
  source 1..21: mol_type = other RNA
ccataagcctctatttctgat

SEQ ID NO: 1690 - skipped

SEQ ID NO: 1691 - RNA, 24 nt, synthetic construct
  misc_feature 1..24: note = Targeting domain
  source 1..24: mol_type = other RNA
cagctaaatcatgcaagtgaccta

SEQ ID NO: 1692 - RNA, 21 nt, synthetic construct
  misc_feature 1..21: note = Targeting domain
  source 1..21: mol_type = other RNA
ctaaatcatgcaagtgaccta

SEQ ID NO: 1693 - RNA, 24 nt, synthetic construct
  misc_feature 1..24: note = Targeting domain
  source 1..24: mol_type = other RNA
caaacctcttttaaccagacatct

SEQ ID NO: 1694 - RNA, 20 nt, synthetic construct
  misc_feature 1..20: note = Targeting domain
  source 1..20: mol_type = other RNA
cctcttttaaccagacatct

SEQ ID NO: 1695 - RNA, 19 nt, synthetic construct
  misc_feature 1..19: note = Targeting domain
  source 1..19: mol_type = other RNA
ctcttttaaccagacatct

SEQ ID NO: 1696 - skipped

SEQ ID NO: 1697 - RNA, 18 nt, synthetic construct
  misc_feature 1..18: note = Targeting domain
  source 1..18: mol_type = other RNA
cataatttagtaggaatc

SEQ ID NO: 1698 - RNA, 22 nt, synthetic construct
  misc_feature 1..22: note = Targeting domain
  source 1..22: mol_type = other RNA
cacctctctttggcaaaagcag

SEQ ID NO: 1699 - skipped

SEQ ID NO: 1700 - RNA, 19 nt, synthetic construct
  misc_feature 1..19: note = Targeting domain
  source 1..19: mol_type = other RNA
ctctctttggcaaaagcag

SEQ ID NO: 1701 - RNA, 24 nt, synthetic construct
  misc_feature 1..24: note = Targeting domain
  source 1..24: mol_type = other RNA
caggtagaatattgtaatcaaagg

SEQ ID NO: 1702 - RNA, 23 nt, synthetic construct
  misc_feature 1..23: note = Targeting domain
  source 1..23: mol_type = other RNA
ccaaggaacaaaagccagggacc

SEQ ID NO: 1703 - RNA, 22 nt, synthetic construct
  misc_feature 1..22: note = Targeting domain
  source 1..22: mol_type = other RNA
caaggaacaaaagccagggacc

SEQ ID NO: 1704 - RNA, 23 nt, synthetic construct
  misc_feature 1..23: note = Targeting domain
  source 1..23: mol_type = other RNA
catccattccaaggaacaaaagc

SEQ ID NO: 1705 - RNA, 20 nt, synthetic construct
  misc_feature 1..20: note = Targeting domain
  source 1..20: mol_type = other RNA
ccattccaaggaacaaaagc

SEQ ID NO: 1706 - RNA, 19 nt, synthetic construct
  misc_feature 1..19: note = Targeting domain
  source 1..19: mol_type = other RNA
cattccaaggaacaaaagc

SEQ ID NO: 1707 - RNA, 24 nt, synthetic construct
  misc_feature 1..24: note = Targeting domain
  source 1..24: mol_type = other RNA
ctcttgcctaggactttctaatgc

SEQ ID NO: 1708 - RNA, 22 nt, synthetic construct
  misc_feature 1..22: note = Targeting domain
  source 1..22: mol_type = other RNA
cttgcctaggactttctaatgc

SEQ ID NO: 1709 - RNA, 18 nt, synthetic construct
  misc_feature 1..18: note = Targeting domain
  source 1..18: mol_type = other RNA
cctaggactttctaatgc

SEQ ID NO: 1710 - RNA, 23 nt, synthetic construct
  misc_feature 1..23: note = Targeting domain
  source 1..23: mol_type = other RNA
cctgatttgttcatcttcctcat

SEQ ID NO: 1711 - RNA, 22 nt, synthetic construct
  misc_feature 1..22: note = Targeting domain
  source 1..22: mol_type = other RNA
ctgatttgttcatcttcctcat

SEQ ID NO: 1712 - RNA, 22 nt, synthetic construct
  misc_feature 1..22: note = Targeting domain
  source 1..22: mol_type = other RNA
cctcttttaaccagacatctaa

SEQ ID NO: 1713 - RNA, 21 nt, synthetic construct
  misc_feature 1..21: note = Targeting domain
  source 1..21: mol_type = other RNA
ctcttttaaccagacatctaa

SEQ ID NO: 1714 - RNA, 19 nt, synthetic construct
  misc_feature 1..19: note = Targeting domain
  source 1..19: mol_type = other RNA
cttttaaccagacatctaa

SEQ ID NO: 1715 - RNA, 24 nt, synthetic construct
  misc_feature 1..24: note = Targeting domain
  source 1..24: mol_type = other RNA
cctctgtcctatcctctccagcat

SEQ ID NO: 1716 - RNA, 23 nt, synthetic construct
  misc_feature 1..23: note = Targeting domain
  source 1..23: mol_type = other RNA
ctctgtcctatcctctccagcat

SEQ ID NO: 1717 - RNA, 21 nt, synthetic construct
  misc_feature 1..21: note = Targeting domain
  source 1..21: mol_type = other RNA
ctgtcctatcctctccagcat

SEQ ID NO: 1718 - RNA, 23 nt, synthetic construct
  misc_feature 1..23: note = Targeting domain
  source 1..23: mol_type = other RNA
caggtagaatattgtaatcaaag

SEQ ID NO: 1719 - RNA, 20 nt, synthetic construct
  misc_feature 1..20: note = Targeting domain
  source 1..20: mol_type = other RNA
ctgggtacaggggtaagaga

SEQ ID NO: 1720 - RNA, 19 nt, synthetic construct
  misc_feature 1..19: note = Targeting domain
  source 1..19: mol_type = other RNA
ctttctgctgcttttgcca

SEQ ID NO: 1721 - RNA, 24 nt, synthetic construct
  misc_feature 1..24: note = Targeting domain
  source 1..24: mol_type = other RNA
cagacatctaagagaaaaaggagc

SEQ ID NO: 1722 - RNA, 20 nt, synthetic construct
  misc_feature 1..20: note = Targeting domain
  source 1..20: mol_type = other RNA
catctaagagaaaaaggagc

SEQ ID NO: 1723 - RNA, 24 nt, synthetic construct
  misc_feature 1..24: note = Targeting domain
  source 1..24: mol_type = other RNA
ctggagaggataggacagaggaca

SEQ ID NO: 1724 - RNA, 24 nt, synthetic construct
  misc_feature 1..24: note = Targeting domain
  source 1..24: mol_type = other RNA
caaggaacaaaagccagggaccat

SEQ ID NO: 1725 - RNA, 23 nt, synthetic construct
  misc_feature 1..23: note = Targeting domain
  source 1..23: mol_type = other RNA
catttattctacaataaaaaatg

SEQ ID NO: 1726 - RNA, 24 nt, synthetic construct
  misc_feature 1..24: note = Targeting domain
  source 1..24: mol_type = other RNA
gctactgttggctacatccattcc

SEQ ID NO: 1727 - RNA, 18 nt, synthetic construct
  misc_feature 1..18: note = Targeting domain
  source 1..18: mol_type = other RNA
gttggctacatccattcc

SEQ ID NO: 1728 - RNA, 19 nt, synthetic construct
  misc_feature 1..19: note = Targeting domain
  source 1..19: mol_type = other RNA
gcattagaaagtcctaggc

SEQ ID NO: 1729 - RNA, 19 nt, synthetic construct
  misc_feature 1..19: note = Targeting domain
  source 1..19: mol_type = other RNA
ggtccctggcttttgttcc

SEQ ID NO: 1730 - RNA, 18 nt, synthetic construct
  misc_feature 1..18: note = Targeting domain
  source 1..18: mol_type = other RNA
gtccctggcttttgttcc

SEQ ID NO: 1731 - RNA, 24 nt, synthetic construct
  misc_feature 1..24: note = Targeting domain
  source 1..24: mol_type = other RNA
ggctcatagagacacattcagtaa

SEQ ID NO: 1732 - RNA, 23 nt, synthetic construct
  misc_feature 1..23: note = Targeting domain
  source 1..23: mol_type = other RNA
gctcatagagacacattcagtaa

SEQ ID NO: 1733 - RNA, 23 nt, synthetic construct
  misc_feature 1..23: note = Targeting domain
  source 1..23: mol_type = other RNA
gctcaaaagcttttgctggctca

SEQ ID NO: 1734 - RNA, 22 nt, synthetic construct
  misc_feature 1..22: note = Targeting domain
  source 1..22: mol_type = other RNA
gctaaatcatgcaagtgaccta

SEQ ID NO: 1735 - RNA, 23 nt, synthetic construct
  misc_feature 1..23: note = Targeting domain
  source 1..23: mol_type = other RNA
gtttgttctgggtacaggggtaa

SEQ ID NO: 1736 - RNA, 19 nt, synthetic construct
  misc_feature 1..19: note = Targeting domain
  source 1..19: mol_type = other RNA
gttctgggtacaggggtaa

SEQ ID NO: 1737 - RNA, 22 nt, synthetic construct
  misc_feature 1..22: note = CEP290-312/-926 targeting domain (RNA)
  source 1..22: mol_type = other RNA
gactcataatttagtaggaatc

SEQ ID NO: 1738 - RNA, 23 nt, synthetic construct
  misc_feature 1..23: note = Targeting domain
  source 1..23: mol_type = other RNA
ggaatggatgtagccaacagtag

SEQ ID NO: 1739 - RNA, 22 nt, synthetic construct
  misc_feature 1..22: note = Targeting domain
  source 1..22: mol_type = other RNA
gaatggatgtagccaacagtag

SEQ ID NO: 1740 - RNA, 18 nt, synthetic construct
  misc_feature 1..18: note = Targeting domain
  source 1..18: mol_type = other RNA
ggatgtagccaacagtag

SEQ ID NO: 1741 - RNA, 22 nt, synthetic construct
  misc_feature 1..22: note = Targeting domain
  source 1..22: mol_type = other RNA
ggtagaatattgtaatcaaagg

SEQ ID NO: 1742 - RNA, 21 nt, synthetic construct
  misc_feature 1..21: note = Targeting domain
  source 1..21: mol_type = other RNA
gtagaatattgtaatcaaagg

SEQ ID NO: 1743 - RNA, 18 nt, synthetic construct
  misc_feature 1..18: note = Targeting domain
  source 1..18: mol_type = other RNA
gaatattgtaatcaaagg

SEQ ID NO: 1744 - RNA, 19 nt, synthetic construct
  misc_feature 1..19: note = Targeting domain
  source 1..19: mol_type = other RNA
ggaacaaaagccagggacc

SEQ ID NO: 1745 - RNA, 18 nt, synthetic construct
  misc_feature 1..18: note = Targeting domain
  source 1..18: mol_type = other RNA
gaacaaaagccagggacc

SEQ ID NO: 1746 - RNA, 23 nt, synthetic construct
  misc_feature 1..23: note = Targeting domain
  source 1..23: mol_type = other RNA
gaattagatcttattctactcct

SEQ ID NO: 1747 - RNA, 19 nt, synthetic construct
  misc_feature 1..19: note = Targeting domain
  source 1..19: mol_type = other RNA
gcctaggactttctaatgc

SEQ ID NO: 1748 - skipped

SEQ ID NO: 1749 - RNA, 24 nt, synthetic construct
  misc_feature 1..24: note = Targeting domain
  source 1..24: mol_type = other RNA
gagaggtgattatgttacttttta

SEQ ID NO: 1750 - RNA, 22 nt, synthetic construct
  misc_feature 1..22: note = Targeting domain
  source 1..22: mol_type = other RNA
gaggtgattatgttacttttta

SEQ ID NO: 1751 - skipped

SEQ ID NO: 1752 - RNA, 19 nt, synthetic construct
  misc_feature 1..19: note = Targeting domain
  source 1..19: mol_type = other RNA
gtgattatgttacttttta

SEQ ID NO: 1753 - RNA, 19 nt, synthetic construct
  misc_feature 1..19: note = Targeting domain
  source 1..19: mol_type = other RNA
gtcctatcctctccagcat

SEQ ID NO: 1754 - RNA, 23 nt, synthetic construct
  misc_feature 1..23: note = Targeting domain
  source 1..23: mol_type = other RNA
gataaacatgactcataatttag

SEQ ID NO: 1755 - RNA, 21 nt, synthetic construct
  misc_feature 1..21: note = Targeting domain
  source 1..21: mol_type = other RNA
ggtagaatattgtaatcaaag

SEQ ID NO: 1756 - RNA, 20 nt, synthetic construct
  misc_feature 1..20: note = Targeting domain
  source 1..20: mol_type = other RNA
gtagaatattgtaatcaaag

SEQ ID NO: 1757 - RNA, 23 nt, synthetic construct
  misc_feature 1..23: note = Targeting domain
  source 1..23: mol_type = other RNA
gttctgggtacaggggtaagaga

SEQ ID NO: 1758 - RNA, 18 nt, synthetic construct
  misc_feature 1..18: note = Targeting domain
  source 1..18: mol_type = other RNA
gggtacaggggtaagaga

SEQ ID NO: 1759 - RNA, 21 nt, synthetic construct
  misc_feature 1..21: note = Targeting domain
  source 1..21: mol_type = other RNA
gtttgttctgggtacaggggt

SEQ ID NO: 1760 - RNA, 24 nt, synthetic construct
  misc_feature 1..24: note = Targeting domain
  source 1..24: mol_type = other RNA
gtttgctttctgctgcttttgcca

SEQ ID NO: 1761 - skipped

SEQ ID NO: 1762 - RNA, 22 nt, synthetic construct
  misc_feature 1..22: note = Targeting domain
  source 1..22: mol_type = other RNA
gacatctaagagaaaaaggagc

SEQ ID NO: 1763 - RNA, 22 nt, synthetic construct
  misc_feature 1..22: note = Targeting domain
  source 1..22: mol_type = other RNA
ggagaggataggacagaggaca

SEQ ID NO: 1764 - RNA, 21 nt, synthetic construct
  misc_feature 1..21: note = Targeting domain
  source 1..21: mol_type = other RNA
gagaggataggacagaggaca

SEQ ID NO: 1765 - RNA, 19 nt, synthetic construct
  misc_feature 1..19: note = Targeting domain
  source 1..19: mol_type = other RNA
gaggataggacagaggaca

SEQ ID NO: 1766 - RNA, 21 nt, synthetic construct
  misc_feature 1..21: note = Targeting domain
  source 1..21: mol_type = other RNA
ggaaagatgaaaaatactctt

SEQ ID NO: 1767 - RNA, 22 nt, synthetic construct
  misc_feature 1..22: note = Targeting domain
  source 1..22: mol_type = other RNA
ggaaagatgaaaaatactcttt

SEQ ID NO: 1768 - RNA, 21 nt, synthetic construct
  misc_feature 1..21: note = Targeting domain
  source 1..21: mol_type = other RNA
gaaagatgaaaaatactcttt

SEQ ID NO: 1769 - skipped

SEQ ID NO: 1770 - RNA, 19 nt, synthetic construct
  misc_feature 1..19: note = Targeting domain
  source 1..19: mol_type = other RNA
gaaagatgaaaaatactct

SEQ ID NO: 1771 - RNA, 24 nt, synthetic construct
  misc_feature 1..24: note = Targeting domain
  source 1..24: mol_type = other RNA
ggataggacagaggacatggagaa

SEQ ID NO: 1772 - RNA, 23 nt, synthetic construct
  misc_feature 1..23: note = Targeting domain
  source 1..23: mol_type = other RNA
gataggacagaggacatggagaa

SEQ ID NO: 1773 - RNA, 19 nt, synthetic construct
  misc_feature 1..19: note = Targeting domain
  source 1..19: mol_type = other RNA
ggacagaggacatggagaa

SEQ ID NO: 1774 - RNA, 18 nt, synthetic construct
  misc_feature 1..18: note = Targeting domain
  source 1..18: mol_type = other RNA
gacagaggacatggagaa

SEQ ID NO: 1775 - RNA, 23 nt, synthetic construct
  misc_feature 1..23: note = Targeting domain
  source 1..23: mol_type = other RNA
ggataggacagaggacatggaga

SEQ ID NO: 1776 - RNA, 22 nt, synthetic construct
  misc_feature 1..22: note = Targeting domain
  source 1..22: mol_type = other RNA
gataggacagaggacatggaga

SEQ ID NO: 1777 - RNA, 18 nt, synthetic construct
  misc_feature 1..18: note = Targeting domain
  source 1..18: mol_type = other RNA
ggacagaggacatggaga

SEQ ID NO: 1778 - RNA, 21 nt, synthetic construct
  misc_feature 1..21: note = Targeting domain
  source 1..21: mol_type = other RNA
ggaacaaaagccagggaccat

SEQ ID NO: 1779 - RNA, 21 nt, synthetic construct
  misc_feature 1..21: note = Targeting domain
  source 1..21: mol_type = other RNA
gtgtgtgtgtgtgtgtgttat

SEQ ID NO: 1780 - RNA, 19 nt, synthetic construct
  misc_feature 1..19: note = Targeting domain
  source 1..19: mol_type = other RNA
gtgtgtgtgtgtgtgttat

SEQ ID NO: 1781 - RNA, 22 nt, synthetic construct
  misc_feature 1..22: note = Targeting domain
  source 1..22: mol_type = other RNA
gtgtgtgtgtgtgtgtgttatg

SEQ ID NO: 1782 - skipped

SEQ ID NO: 1783 - RNA, 18 nt, synthetic construct
  misc_feature 1..18: note = Targeting domain
  source 1..18: mol_type = other RNA
gtgtgtgtgtgtgttatg

SEQ ID NO: 1784 - RNA, 22 nt, synthetic construct
  misc_feature 1..22: note = Targeting domain
  source 1..22: mol_type = other RNA
tactgttggctacatccattcc

SEQ ID NO: 1785 - RNA, 19 nt, synthetic construct
  misc_feature 1..19: note = CEP290-967 targeting domain (RNA)
  source 1..19: mol_type = other RNA
tgttggctacatccattcc

SEQ ID NO: 1786 - RNA, 22 nt, synthetic construct
  misc_feature 1..22: note = Targeting domain
  source 1..22: mol_type = other RNA
tttacagagtgcatccatggtc

SEQ ID NO: 1787 - RNA, 21 nt, synthetic construct
  misc_feature 1..21: note = Targeting domain
  source 1..21: mol_type = other RNA
ttacagagtgcatccatggtc

SEQ ID NO: 1788 - RNA, 20 nt, synthetic construct
  misc_feature 1..20: note = Targeting domain
  source 1..20: mol_type = other RNA
tacagagtgcatccatggtc

SEQ ID NO: 1789 - RNA, 23 nt, synthetic construct
  misc_feature 1..23: note = Targeting domain
  source 1..23: mol_type = other RNA
tccagcattagaaagtcctaggc

SEQ ID NO: 1790 - RNA, 20 nt, synthetic construct
  misc_feature 1..20: note = Targeting domain
  source 1..20: mol_type = other RNA
tggtccctggcttttgttcc

SEQ ID NO: 1791 - RNA, 21 nt, synthetic construct
  misc_feature 1..21: note = Targeting domain
  source 1..21: mol_type = other RNA
tcatagagacacattcagtaa

SEQ ID NO: 1792 - RNA, 18 nt, synthetic construct
  misc_feature 1..18: note = Targeting domain
  source 1..18: mol_type = other RNA
tagagacacattcagtaa

SEQ ID NO: 1793 - RNA, 21 nt, synthetic construct
  misc_feature 1..21: note = Targeting domain
  source 1..21: mol_type = other RNA
tcaaaagcttttgctggctca

SEQ ID NO: 1794 - RNA, 22 nt, synthetic construct
  misc_feature 1..22: note = CEP290-985 targeting domain (RNA)
  source 1..22: mol_type = other RNA
tccataagcctctatttctgat

SEQ ID NO: 1795 - RNA, 18 nt, synthetic construct
  misc_feature 1..18: note = Targeting domain
  source 1..18: mol_type = other RNA
taagcctctatttctgat

SEQ ID NO: 1796 - RNA, 18 nt, synthetic construct
  misc_feature 1..18: note = CEP290-988 targeting domain (RNA)
  source 1..18: mol_type = other RNA
tcttttaaccagacatct

SEQ ID NO: 1797 - RNA, 22 nt, synthetic construct
  misc_feature 1..22: note = Targeting domain
  source 1..22: mol_type = other RNA
tttgttctgggtacaggggtaa

SEQ ID NO: 1798 - RNA, 21 nt, synthetic construct
  misc_feature 1..21: note = Targeting domain
  source 1..21: mol_type = other RNA
ttgttctgggtacaggggtaa

SEQ ID NO: 1799 - RNA, 20 nt, synthetic construct
  misc_feature 1..20: note = Targeting domain
  source 1..20: mol_type = other RNA
tgttctgggtacaggggtaa

SEQ ID NO: 1800 - RNA, 18 nt, synthetic construct
  misc_feature 1..18: note = CEP290-992 targeting domain (RNA)
  source 1..18: mol_type = other RNA
ttctgggtacaggggtaa

SEQ ID NO: 1801 - RNA, 23 nt, synthetic construct
  misc_feature 1..23: note = Targeting domain
  source 1..23: mol_type = other RNA
tgactcataatttagtaggaatc

SEQ ID NO: 1802 - RNA, 19 nt, synthetic construct
  misc_feature 1..19: note = Targeting domain
  source 1..19: mol_type = other RNA
tcataatttagtaggaatc

SEQ ID NO: 1803 - RNA, 24 nt, synthetic construct
  misc_feature 1..24: note = Targeting domain
  source 1..24: mol_type = other RNA
tggaatggatgtagccaacagtag

SEQ ID NO: 1804 - RNA, 19 nt, synthetic construct
  misc_feature 1..19: note = Targeting domain
  source 1..19: mol_type = other RNA
tggatgtagccaacagtag

SEQ ID NO: 1805 - RNA, 23 nt, synthetic construct
  misc_feature 1..23: note = Targeting domain
  source 1..23: mol_type = other RNA
tcacctctctttggcaaaagcag

SEQ ID NO: 1806 - RNA, 18 nt, synthetic construct
  misc_feature 1..18: note = Targeting domain
  source 1..18: mol_type = other RNA
tctctttggcaaaagcag

SEQ ID NO: 1807 - RNA, 20 nt, synthetic construct
  misc_feature 1..20: note = Targeting domain
  source 1..20: mol_type = other RNA
tagaatattgtaatcaaagg

SEQ ID NO: 1808 - RNA, 24 nt, synthetic construct
  misc_feature 1..24: note = Targeting domain
  source 1..24: mol_type = other RNA
tccaaggaacaaaagccagggacc

SEQ ID NO: 1809 - RNA, 21 nt, synthetic construct
  misc_feature 1..21: note = CEP290-1001 targeting domain (RNA)
  source 1..21: mol_type = other RNA
tccattccaaggaacaaaagc

SEQ ID NO: 1810 - skipped

SEQ ID NO: 1811 - RNA, 19 nt, synthetic construct
  misc_feature 1..19: note = Targeting domain
  source 1..19: mol_type = other RNA
tagatcttattctactcct

SEQ ID NO: 1812 - RNA, 23 nt, synthetic construct
  misc_feature 1..23: note = Targeting domain
  source 1..23: mol_type = other RNA
tcttgcctaggactttctaatgc

SEQ ID NO: 1813 - RNA, 21 nt, synthetic construct
  misc_feature 1..21: note = Targeting domain
  source 1..21: mol_type = other RNA
ttgcctaggactttctaatgc

SEQ ID NO: 1814 - RNA, 24 nt, synthetic construct
  misc_feature 1..24: note = Targeting domain
  source 1..24: mol_type = other RNA
tcctgatttgttcatcttcctcat

SEQ ID NO: 1815 - RNA, 21 nt, synthetic construct
  misc_feature 1..21: note = Targeting domain
  source 1..21: mol_type = other RNA
tgatttgttcatcttcctcat

SEQ ID NO: 1816 - RNA, 18 nt, synthetic construct
  misc_feature 1..18: note = Targeting domain
  source 1..18: mol_type = other RNA
tttgttcatcttcctcat

SEQ ID NO: 1817 - RNA, 18 nt, synthetic construct
  misc_feature 1..18: note = CEP290-1010 targeting domain (RNA)
  source 1..18: mol_type = other RNA
tgattatgttacttttta

SEQ ID NO: 1818 - RNA, 20 nt, synthetic construct
  misc_feature 1..20: note = CEP290-1011 targeting domain (RNA)
  source 1..20: mol_type = other RNA
tcttttaaccagacatctaa

SEQ ID NO: 1819 - RNA, 18 nt, synthetic construct
  misc_feature 1..18: note = Targeting domain
  source 1..18: mol_type = other RNA
ttttaaccagacatctaa

SEQ ID NO: 1820 - RNA, 22 nt, synthetic construct
  misc_feature 1..22: note = Targeting domain
  source 1..22: mol_type = other RNA
tctgtcctatcctctccagcat

SEQ ID NO: 1821 - skipped

SEQ ID NO: 1822 - RNA, 18 nt, synthetic construct
  misc_feature 1..18: note = Targeting domain
  source 1..18: mol_type = other RNA
tcctatcctctccagcat

SEQ ID NO: 1823 - RNA, 24 nt, synthetic construct
  misc_feature 1..24: note = Targeting domain
  source 1..24: mol_type = other RNA
tgataaacatgactcataatttag

SEQ ID NO: 1824 - RNA, 21 nt, synthetic construct
  misc_feature 1..21: note = Targeting domain
  source 1..21: mol_type = other RNA
taaacatgactcataatttag

SEQ ID NO: 1825 - RNA, 19 nt, synthetic construct
  misc_feature 1..19: note = Targeting domain
  source 1..19: mol_type = other RNA
tagaatattgtaatcaaag

SEQ ID NO: 1826 - RNA, 24 nt, synthetic construct
  misc_feature 1..24: note = Targeting domain
  source 1..24: mol_type = other RNA
tgttctgggtacaggggtaagaga

SEQ ID NO: 1827 - RNA, 22 nt, synthetic construct
  misc_feature 1..22: note = Targeting domain
  source 1..22: mol_type = other RNA
ttctgggtacaggggtaagaga

SEQ ID NO: 1828 - RNA, 21 nt, synthetic construct
  misc_feature 1..21: note = Targeting domain
  source 1..21: mol_type = other RNA
tctgggtacaggggtaagaga

SEQ ID NO: 1829 - RNA, 19 nt, synthetic construct
  misc_feature 1..19: note = Targeting domain
  source 1..19: mol_type = other RNA
tgggtacaggggtaagaga

SEQ ID NO: 1830 - RNA, 23 nt, synthetic construct
  misc_feature 1..23: note = CEP290-1023 targeting domain (RNA)
  source 1..23: mol_type = other RNA
tagtttgttctgggtacaggggt

SEQ ID NO: 1831 - RNA, 20 nt, synthetic construct
  misc_feature 1..20: note = Targeting domain
  source 1..20: mol_type = other RNA
tttgttctgggtacaggggt

SEQ ID NO: 1832 - RNA, 19 nt, synthetic construct
  misc_feature 1..19: note = Targeting domain
  source 1..19: mol_type = other RNA
ttgttctgggtacaggggt

SEQ ID NO: 1833 - RNA, 18 nt, synthetic construct
  misc_feature 1..18: note = Targeting domain
  source 1..18: mol_type = other RNA
tgttctgggtacaggggt

SEQ ID NO: 1834 - RNA, 23 nt, synthetic construct
  misc_feature 1..23: note = Targeting domain
  source 1..23: mol_type = other RNA
tttgctttctgctgcttttgcca

SEQ ID NO: 1835 - RNA, 22 nt, synthetic construct
  misc_feature 1..22: note = Targeting domain
  source 1..22: mol_type = other RNA
ttgctttctgctgcttttgcca

SEQ ID NO: 1836 - RNA, 21 nt, synthetic construct
  misc_feature 1..21: note = Targeting domain
  source 1..21: mol_type = other RNA
tgctttctgctgcttttgcca

SEQ ID NO: 1837 - RNA, 18 nt, synthetic construct
  misc_feature 1..18: note = Targeting domain
  source 1..18: mol_type = other RNA
tttctgctgcttttgcca

SEQ ID NO: 1838 - RNA, 18 nt, synthetic construct
  misc_feature 1..18: note = Targeting domain
  source 1..18: mol_type = other RNA
tctaagagaaaaaggagc

SEQ ID NO: 1839 - RNA, 23 nt, synthetic construct
  misc_feature 1..23: note = Targeting domain
  source 1..23: mol_type = other RNA
tggagaggataggacagaggaca

SEQ ID NO: 1840 - RNA, 24 nt, synthetic construct
  misc_feature 1..24: note = Targeting domain
  source 1..24: mol_type = other RNA
ttaggaaagatgaaaaatactctt

SEQ ID NO: 1841 - RNA, 23 nt, synthetic construct
  misc_feature 1..23: note = CEP290-1034 targeting domain (RNA)
  source 1..23: mol_type = other RNA
taggaaagatgaaaaatactctt

SEQ ID NO: 1842 - RNA, 24 nt, synthetic construct
  misc_feature 1..24: note = Targeting domain
  source 1..24: mol_type = other RNA
taggaaagatgaaaaatactcttt

SEQ ID NO: 1843 - RNA, 24 nt, synthetic construct
  misc_feature 1..24: note = CEP290-1036 targeting domain (RNA)
  source 1..24: mol_type = other RNA
tttaggaaagatgaaaaatactct

SEQ ID NO: 1844 - RNA, 23 nt, synthetic construct
  misc_feature 1..23: note = CEP290-1037 targeting domain (RNA)
  source 1..23: mol_type = other RNA
ttaggaaagatgaaaaatactct

SEQ ID NO: 1845 - RNA, 22 nt, synthetic construct
  misc_feature 1..22: note = Targeting domain
  source 1..22: mol_type = other RNA
taggaaagatgaaaaatactct

SEQ ID NO: 1846 - RNA, 21 nt, synthetic construct
  misc_feature 1..21: note = Targeting domain
  source 1..21: mol_type = other RNA
taggacagaggacatggagaa

SEQ ID NO: 1847 - skipped

SEQ ID NO: 1848 - RNA, 21 nt, synthetic construct
  misc_feature 1..21: note = Targeting domain
  source 1..21: mol_type = other RNA
tttattctacaataaaaaatg

SEQ ID NO: 1849 - RNA, 20 nt, synthetic construct
  misc_feature 1..20: note = Targeting domain
  source 1..20: mol_type = other RNA
ttattctacaataaaaaatg

SEQ ID NO: 1850 - RNA, 19 nt, synthetic construct
  misc_feature 1..19: note = Targeting domain
  source 1..19: mol_type = other RNA
tattctacaataaaaaatg

SEQ ID NO: 1851 - RNA, 23 nt, synthetic construct
  misc_feature 1..23: note = Targeting domain
  source 1..23: mol_type = other RNA
ttgtgtgtgtgtgtgtgtgttat

SEQ ID NO: 1852 - RNA, 22 nt, synthetic construct
  misc_feature 1..22: note = Targeting domain
  source 1..22: mol_type = other RNA
tgtgtgtgtgtgtgtgtgttat

SEQ ID NO: 1853 - RNA, 20 nt, synthetic construct
  misc_feature 1..20: note = Targeting domain
  source 1..20: mol_type = other RNA
tgtgtgtgtgtgtgtgttat

SEQ ID NO: 1854 - RNA, 18 nt, synthetic construct
  misc_feature 1..18: note = Targeting domain
  source 1..18: mol_type = other RNA
tgtgtgtgtgtgtgttat

SEQ ID NO: 1855 - RNA, 24 nt, synthetic construct
  misc_feature 1..24: note = Targeting domain
  source 1..24: mol_type = other RNA
ttgtgtgtgtgtgtgtgtgttatg

SEQ ID NO: 1856 - RNA, 23 nt, synthetic construct
  misc_feature 1..23: note = Targeting domain
  source 1..23: mol_type = other RNA
tgtgtgtgtgtgtgtgtgttatg

SEQ ID NO: 1857 - RNA, 21 nt, synthetic construct
  misc_feature 1..21: note = Targeting domain
  source 1..21: mol_type = other RNA
tgtgtgtgtgtgtgtgttatg

SEQ ID NO: 1858 - RNA, 19 nt, synthetic construct
  misc_feature 1..19: note = Targeting domain
  source 1..19: mol_type = other RNA
tgtgtgtgtgtgtgttatg

SEQ ID NO: 1859 - RNA, 22 nt, synthetic construct
  misc_feature 1..22: note = Targeting domain
  source 1..22: mol_type = other RNA
actgttggctacatccattcca

SEQ ID NO: 1860 - RNA, 24 nt, synthetic construct
  misc_feature 1..24: note = Targeting domain
  source 1..24: mol_type = other RNA
attatccacaagatgtctcttgcc

SEQ ID NO: 1861 - RNA, 21 nt, synthetic construct
  misc_feature 1..21: note = Targeting domain
  source 1..21: mol_type = other RNA
atccacaagatgtctcttgcc

SEQ ID NO: 1862 - RNA, 18 nt, synthetic construct
  misc_feature 1..18: note = Targeting domain
  source 1..18: mol_type = other RNA
atgagccagcaaaagctt

SEQ ID NO: 1863 - RNA, 23 nt, synthetic construct
  misc_feature 1..23: note = Targeting domain
  source 1..23: mol_type = other RNA
acagagtgcatccatggtccagg

SEQ ID NO: 1864 - RNA, 21 nt, synthetic construct
  misc_feature 1..21: note = Targeting domain
  source 1..21: mol_type = other RNA
agagtgcatccatggtccagg

SEQ ID NO: 1865 - RNA, 19 nt, synthetic construct
  misc_feature 1..19: note = CEP290-1058 targeting domain (RNA)
  source 1..19: mol_type = other RNA
agtgcatccatggtccagg

SEQ ID NO: 1866 - RNA, 23 nt, synthetic construct
  misc_feature 1..23: note = CEP290-1059 targeting domain (RNA)
  source 1..23: mol_type = other RNA
agctgaaatattaagggctcttc

SEQ ID NO: 1867 - RNA, 18 nt, synthetic construct
  misc_feature 1..18: note = CEP290-1060 targeting domain (RNA)
  source 1..18: mol_type = other RNA
aaatattaagggctcttc

SEQ ID NO: 1868 - RNA, 23 nt, synthetic construct
  misc_feature 1..23: note = CEP290-1061 targeting domain (RNA)
  source 1..23: mol_type = other RNA
aactctataccttttactgagga

SEQ ID NO: 1869 - RNA, 22 nt, synthetic construct
  misc_feature 1..22: note = CEP290-1062 targeting domain (RNA)
  source 1..22: mol_type = other RNA
actctataccttttactgagga

SEQ ID NO: 1870 - RNA, 23 nt, synthetic construct
  misc_feature 1..23: note = CEP290-1063 targeting domain (RNA)
  source 1..23: mol_type = other RNA
acttgaactctataccttttact

SEQ ID NO: 1871 - RNA, 18 nt, synthetic construct
  misc_feature 1..18: note = Targeting domain
  source 1..18: mol_type = other RNA
aactctataccttttact

SEQ ID NO: 1872 - RNA, 22 nt, synthetic construct
  misc_feature 1..22: note = Targeting domain
  source 1..22: mol_type = other RNA
agtaggaatcctgaaagctact

SEQ ID NO: 1873 - RNA, 19 nt, synthetic construct
  misc_feature 1..19: note = Targeting domain
  source 1..19: mol_type = other RNA
aggaatcctgaaagctact

SEQ ID NO: 1874 - RNA, 22 nt, synthetic construct
  misc_feature 1..22: note = Targeting domain
  source 1..22: mol_type = other RNA
agccaacagtagctgaaatatt

SEQ ID NO: 1875 - RNA, 18 nt, synthetic construct
  misc_feature 1..18: note = Targeting domain
  source 1..18: mol_type = other RNA
aacagtagctgaaatatt

SEQ ID NO: 1876 - RNA, 23 nt, synthetic construct
  misc_feature 1..23: note = Targeting domain
  source 1..23: mol_type = other RNA
atccattccaaggaacaaaagcc

SEQ ID NO: 1877 - RNA, 19 nt, synthetic construct
  misc_feature 1..19: note = Targeting domain
  source 1..19: mol_type = other RNA
attccaaggaacaaaagcc

SEQ ID NO: 1878 - RNA, 24 nt, synthetic construct
  misc_feature 1..24: note = Targeting domain
  source 1..24: mol_type = other RNA
atccctttctcttacccctgtacc

SEQ ID NO: 1879 - RNA, 24 nt, synthetic construct
  misc_feature 1..24: note = Targeting domain
  source 1..24: mol_type = other RNA
aggactttctaatgctggagagga

SEQ ID NO: 1880 - RNA, 21 nt, synthetic construct
  misc_feature 1..21: note = Targeting domain
  source 1..21: mol_type = other RNA
actttctaatgctggagagga

SEQ ID NO: 1881 - RNA, 21 nt, synthetic construct
  misc_feature 1..21: note = Targeting domain
  source 1..21: mol_type = other RNA
aatgctggagaggataggaca

SEQ ID NO: 1882 - skipped

SEQ ID NO: 1883 - RNA, 23 nt, synthetic construct
  misc_feature 1..23: note = Targeting domain
  source 1..23: mol_type = other RNA
atcataagttacaatctgtgaat

SEQ ID NO: 1884 - RNA, 20 nt, synthetic construct
  misc_feature 1..20: note = Targeting domain
  source 1..20: mol_type = other RNA
ataagttacaatctgtgaat

SEQ ID NO: 1885 - RNA, 18 nt, synthetic construct
  misc_feature 1..18: note = Targeting domain
  source 1..18: mol_type = other RNA
aagttacaatctgtgaat

SEQ ID NO: 1886 - RNA, 21 nt, synthetic construct
  misc_feature 1..21: note = Targeting domain
  source 1..21: mol_type = other RNA
aaccagacatctaagagaaaa

SEQ ID NO: 1887 - skipped

SEQ ID NO: 1888 - RNA, 24 nt, synthetic construct
  misc_feature 1..24: note = Targeting domain
  source 1..24: mol_type = other RNA
aagcctctatttctgatgaggaag

SEQ ID NO: 1889 - RNA, 23 nt, synthetic construct
  misc_feature 1..23: note = Targeting domain
  source 1..23: mol_type = other RNA
agcctctatttctgatgaggaag

SEQ ID NO: 1890 - skipped

SEQ ID NO: 1891 - RNA, 19 nt, synthetic construct
  misc_feature 1..19: note = Targeting domain
  source 1..19: mol_type = other RNA
atttactgaatgtgtctct

SEQ ID NO: 1892 - RNA, 19 nt, synthetic construct
  misc_feature 1..19: note = Targeting domain
  source 1..19: mol_type = other RNA
acaggggtaagagaaaggg

SEQ ID NO: 1893 - RNA, 24 nt, synthetic construct
  misc_feature 1..24: note = Targeting domain
  source 1..24: mol_type = other RNA
ctactgttggctacatccattcca

SEQ ID NO: 1894 - RNA, 21 nt, synthetic construct
  misc_feature 1..21: note = Targeting domain
  source 1..21: mol_type = other RNA
ctgttggctacatccattcca

SEQ ID NO: 1895 - RNA, 19 nt, synthetic construct
  misc_feature 1..19: note = Targeting domain
  source 1..19: mol_type = other RNA
ccacaagatgtctcttgcc

SEQ ID NO: 1896 - RNA, 18 nt, synthetic construct
  misc_feature 1..18: note = Targeting domain
  source 1..18: mol_type = other RNA
cacaagatgtctcttgcc

SEQ ID NO: 1897 - RNA, 24 nt, synthetic construct
  misc_feature 1..24: note = Targeting domain
  source 1..24: mol_type = other RNA
cctttgtagttatcttacagccac

SEQ ID NO: 1898 - RNA, 23 nt, synthetic construct
  misc_feature 1..23: note = Targeting domain
  source 1..23: mol_type = other RNA
ctttgtagttatcttacagccac

SEQ ID NO: 1899 - RNA, 22 nt, synthetic construct
  misc_feature 1..22: note = Targeting domain
  source 1..22: mol_type = other RNA
ctctatgagccagcaaaagctt

SEQ ID NO: 1900 - skipped

SEQ ID NO: 1901 - RNA, 22 nt, synthetic construct
  misc_feature 1..22: note = Targeting domain
  source 1..22: mol_type = other RNA
cagagtgcatccatggtccagg

SEQ ID NO: 1902 - RNA, 21 nt, synthetic construct
  misc_feature 1..21: note = Targeting domain
  source 1..21: mol_type = other RNA
ctgaaatattaagggctcttc

SEQ ID NO: 1903 - RNA, 21 nt, synthetic construct
  misc_feature 1..21: note = Targeting domain
  source 1..21: mol_type = other RNA
ctctataccttttactgagga

SEQ ID NO: 1904 - RNA, 19 nt, synthetic construct
  misc_feature 1..19: note = Targeting domain
  source 1..19: mol_type = other RNA
ctataccttttactgagga

SEQ ID NO: 1905 - RNA, 24 nt, synthetic construct
  misc_feature 1..24: note = Targeting domain
  source 1..24: mol_type = other RNA
cacttgaactctataccttttact

SEQ ID NO: 1906 - RNA, 22 nt, synthetic construct
  misc_feature 1..22: note = Targeting domain
  source 1..22: mol_type = other RNA
cttgaactctataccttttact

SEQ ID NO: 1907 - RNA, 20 nt, synthetic construct
  misc_feature 1..20: note = Targeting domain
  source 1..20: mol_type = other RNA
ccaacagtagctgaaatatt

SEQ ID NO: 1908 - RNA, 19 nt, synthetic construct
  misc_feature 1..19: note = Targeting domain
  source 1..19: mol_type = other RNA
caacagtagctgaaatatt

SEQ ID NO: 1909 - RNA, 24 nt, synthetic construct
  misc_feature 1..24: note = Targeting domain
  source 1..24: mol_type = other RNA
catccattccaaggaacaaaagcc

SEQ ID NO: 1910 - RNA, 21 nt, synthetic construct
  misc_feature 1..21: note = Targeting domain
  source 1..21: mol_type = other RNA
ccattccaaggaacaaaagcc

SEQ ID NO: 1911 - skipped

SEQ ID NO: 1912 - RNA, 22 nt, synthetic construct
  misc_feature 1..22: note = Targeting domain
  source 1..22: mol_type = other RNA
ccctttctcttacccctgtacc

SEQ ID NO: 1913 - RNA, 21 nt, synthetic construct
  misc_feature 1..21: note = Targeting domain
  source 1..21: mol_type = other RNA
cctttctcttacccctgtacc

SEQ ID NO: 1914 - RNA, 20 nt, synthetic construct
  misc_feature 1..20: note = Targeting domain
  source 1..20: mol_type = other RNA
ctttctcttacccctgtacc

SEQ ID NO: 1915 - skipped

SEQ ID NO: 1916 - RNA, 23 nt, synthetic construct
  misc_feature 1..23: note = Targeting domain
  source 1..23: mol_type = other RNA
ctaatgctggagaggataggaca

SEQ ID NO: 1917 - RNA, 21 nt, synthetic construct
  misc_feature 1..21: note = Targeting domain
  source 1..21: mol_type = other RNA
cataagttacaatctgtgaat

SEQ ID NO: 1918 - RNA, 19 nt, synthetic construct
  misc_feature 1..19: note = Targeting domain
  source 1..19: mol_type = other RNA
ccagacatctaagagaaaa

SEQ ID NO: 1919 - RNA, 18 nt, synthetic construct
  misc_feature 1..18: note = Targeting domain
  source 1..18: mol_type = other RNA
cagacatctaagagaaaa

SEQ ID NO: 1920 - RNA, 21 nt, synthetic construct
  misc_feature 1..21: note = Targeting domain
  source 1..21: mol_type = other RNA
cctctatttctgatgaggaag

SEQ ID NO: 1921 - skipped

SEQ ID NO: 1922 - RNA, 18 nt, synthetic construct
  misc_feature 1..18: note = Targeting domain
  source 1..18: mol_type = other RNA
ctatttctgatgaggaag

SEQ ID NO: 1923 - RNA, 23 nt, synthetic construct
  misc_feature 1..23: note = Targeting domain
  source 1..23: mol_type = other RNA
ctgatgaggaagatgaacaaatc

SEQ ID NO: 1924 - skipped

SEQ ID NO: 1925 - RNA, 18 nt, synthetic construct
  misc_feature 1..18: note = Targeting domain
  source 1..18: mol_type = other RNA
caggggtaagagaaaggg

SEQ ID NO: 1926 - RNA, 19 nt, synthetic construct
  misc_feature 1..19: note = Targeting domain
  source 1..19: mol_type = other RNA
gttggctacatccattcca

SEQ ID NO: 1927 - RNA, 19 nt, synthetic construct
  misc_feature 1..19: note = Targeting domain
  source 1..19: mol_type = other RNA
gtagttatcttacagccac

SEQ ID NO: 1928 - RNA, 24 nt, synthetic construct
  misc_feature 1..24: note = Targeting domain
  source 1..24: mol_type = other RNA
gtctctatgagccagcaaaagctt

SEQ ID NO: 1929 - RNA, 20 nt, synthetic construct
  misc_feature 1..20: note = Targeting domain
  source 1..20: mol_type = other RNA
gagtgcatccatggtccagg

SEQ ID NO: 1930 - RNA, 18 nt, synthetic construct
  misc_feature 1..18: note = Targeting domain
  source 1..18: mol_type = other RNA
gtgcatccatggtccagg

SEQ ID NO: 1931 - RNA, 22 nt, synthetic construct
  misc_feature 1..22: note = Targeting domain
  source 1..22: mol_type = other RNA
gctgaaatattaagggctcttc

SEQ ID NO: 1932 - RNA, 19 nt, synthetic construct
  misc_feature 1..19: note = Targeting domain
  source 1..19: mol_type = other RNA
gaaatattaagggctcttc

SEQ ID NO: 1933 - RNA, 24 nt, synthetic construct
  misc_feature 1..24: note = Targeting domain
  source 1..24: mol_type = other RNA
gaactctataccttttactgagga

SEQ ID NO: 1934 - RNA, 19 nt, synthetic construct
  misc_feature 1..19: note = Targeting domain
  source 1..19: mol_type = other RNA
gaactctataccttttact

SEQ ID NO: 1935 - RNA, 21 nt, synthetic construct
  misc_feature 1..21: note = Targeting domain
  source 1..21: mol_type = other RNA
gtaggaatcctgaaagctact

SEQ ID NO: 1936 - RNA, 18 nt, synthetic construct
  misc_feature 1..18: note = Targeting domain
  source 1..18: mol_type = other RNA
ggaatcctgaaagctact

SEQ ID NO: 1937 - RNA, 24 nt, synthetic construct
  misc_feature 1..24: note = Targeting domain
  source 1..24: mol_type = other RNA
gtagccaacagtagctgaaatatt

SEQ ID NO: 1938 - RNA, 21 nt, synthetic construct
  misc_feature 1..21: note = Targeting domain
  source 1..21: mol_type = other RNA
gccaacagtagctgaaatatt

SEQ ID NO: 1939 - RNA, 23 nt, synthetic construct
  misc_feature 1..23: note = Targeting domain
  source 1..23: mol_type = other RNA
ggactttctaatgctggagagga

SEQ ID NO: 1940 - RNA, 22 nt, synthetic construct
  misc_feature 1..22: note = CEP290-1133 targeting domain (RNA)
  source 1..22: mol_type = other RNA
gactttctaatgctggagagga

SEQ ID NO: 1941 - RNA, 18 nt, synthetic construct
  misc_feature 1..18: note = Targeting domain
  source 1..18: mol_type = other RNA
gctggagaggataggaca

SEQ ID NO: 1942 - RNA, 22 nt, synthetic construct
  misc_feature 1..22: note = Targeting domain
  source 1..22: mol_type = other RNA
gcctctatttctgatgaggaag

SEQ ID NO: 1943 - RNA, 21 nt, synthetic construct
  misc_feature 1..21: note = Targeting domain
  source 1..21: mol_type = other RNA
gatgaggaagatgaacaaatc

SEQ ID NO: 1944 - RNA, 18 nt, synthetic construct
  misc_feature 1..18: note = Targeting domain
  source 1..18: mol_type = other RNA
gaggaagatgaacaaatc

SEQ ID NO: 1945 - RNA, 23 nt, synthetic construct
  misc_feature 1..23: note = Targeting domain
  source 1..23: mol_type = other RNA
gggtacaggggtaagagaaaggg

SEQ ID NO: 1946 - RNA, 22 nt, synthetic construct
  misc_feature 1..22: note = Targeting domain
  source 1..22: mol_type = other RNA
ggtacaggggtaagagaaaggg

SEQ ID NO: 1947 - RNA, 21 nt, synthetic construct
  misc_feature 1..21: note = Targeting domain
  source 1..21: mol_type = other RNA
gtacaggggtaagagaaaggg

SEQ ID NO: 1948 - RNA, 23 nt, synthetic construct
  misc_feature 1..23: note = Targeting domain
  source 1..23: mol_type = other RNA
gtgtgtgtgtgtgtgtgttatgt

SEQ ID NO: 1949 - RNA, 21 nt, synthetic construct
  misc_feature 1..21: note = Targeting domain
  source 1..21: mol_type = other RNA
gtgtgtgtgtgtgtgttatgt

SEQ ID NO: 1950 - RNA, 19 nt, synthetic construct
  misc_feature 1..19: note = Targeting domain
  source 1..19: mol_type = other RNA
gtgtgtgtgtgtgttatgt

SEQ ID NO: 1951 - RNA, 23 nt, synthetic construct
  misc_feature 1..23: note = Targeting domain
  source 1..23: mol_type = other RNA
tactgttggctacatccattcca

SEQ ID NO: 1952 - RNA, 20 nt, synthetic construct
  misc_feature 1..20: note = Targeting domain
  source 1..20: mol_type = other RNA
tgttggctacatccattcca

SEQ ID NO: 1953 - RNA, 18 nt, synthetic construct
  misc_feature 1..18: note = Targeting domain
  source 1..18: mol_type = other RNA
ttggctacatccattcca

SEQ ID NO: 1954 - RNA, 23 nt, synthetic construct
  misc_feature 1..23: note = Targeting domain
  source 1..23: mol_type = other RNA
ttatccacaagatgtctcttgcc

SEQ ID NO: 1955 - RNA, 22 nt, synthetic construct
  misc_feature 1..22: note = Targeting domain
  source 1..22: mol_type = other RNA
tatccacaagatgtctcttgcc

SEQ ID NO: 1956 - skipped

SEQ ID NO: 1957 - RNA, 22 nt, synthetic construct
  misc_feature 1..22: note = Targeting domain
  source 1..22: mol_type = other RNA
tttgtagttatcttacagccac

SEQ ID NO: 1958 - RNA, 21 nt, synthetic construct
  misc_feature 1..21: note = Targeting domain
  source 1..21: mol_type = other RNA
ttgtagttatcttacagccac

SEQ ID NO: 1959 - RNA, 20 nt, synthetic construct
  misc_feature 1..20: note = Targeting domain
  source 1..20: mol_type = other RNA
tgtagttatcttacagccac

SEQ ID NO: 1960 - RNA, 18 nt, synthetic construct
  misc_feature 1..18: note = Targeting domain
  source 1..18: mol_type = other RNA
tagttatcttacagccac

SEQ ID NO: 1961 - RNA, 23 nt, synthetic construct
  misc_feature 1..23: note = Targeting domain
  source 1..23: mol_type = other RNA
tctctatgagccagcaaaagctt

SEQ ID NO: 1962 - RNA, 21 nt, synthetic construct
  misc_feature 1..21: note = Targeting domain
  source 1..21: mol_type = other RNA
tctatgagccagcaaaagctt

SEQ ID NO: 1963 - RNA, 19 nt, synthetic construct
  misc_feature 1..19: note = Targeting domain
  source 1..19: mol_type = other RNA
tatgagccagcaaaagctt

SEQ ID NO: 1964 - RNA, 24 nt, synthetic construct
  misc_feature 1..24: note = Targeting domain
  source 1..24: mol_type = other RNA
tacagagtgcatccatggtccagg

SEQ ID NO: 1965 - RNA, 24 nt, synthetic construct
  misc_feature 1..24: note = Targeting domain
  source 1..24: mol_type = other RNA
tagctgaaatattaagggctcttc

SEQ ID NO: 1966 - RNA, 20 nt, synthetic construct
  misc_feature 1..20: note = Targeting domain
  source 1..20: mol_type = other RNA
tgaaatattaagggctcttc

SEQ ID NO: 1967 - skipped

SEQ ID NO: 1968 - RNA, 18 nt, synthetic construct
  misc_feature 1..18: note = Targeting domain
  source 1..18: mol_type = other RNA
tataccttttactgagga

SEQ ID NO: 1969 - RNA, 21 nt, synthetic construct
  misc_feature 1..21: note = Targeting domain
  source 1..21: mol_type = other RNA
ttgaactctataccttttact

SEQ ID NO: 1970 - RNA, 20 nt, synthetic construct
  misc_feature 1..20: note = Targeting domain
  source 1..20: mol_type = other RNA
tgaactctataccttttact

SEQ ID NO: 1971 - RNA, 24 nt, synthetic construct
  misc_feature 1..24: note = Targeting domain
  source 1..24: mol_type = other RNA
ttagtaggaatcctgaaagctact

SEQ ID NO: 1972 - RNA, 23 nt, synthetic construct
  misc_feature 1..23: note = Targeting domain
  source 1..23: mol_type = other RNA
tagtaggaatcctgaaagctact

SEQ ID NO: 1973 - skipped

SEQ ID NO: 1974 - RNA, 23 nt, synthetic construct
  misc_feature 1..23: note = Targeting domain
  source 1..23: mol_type = other RNA
tagccaacagtagctgaaatatt

SEQ ID NO: 1975 - RNA, 22 nt, synthetic construct
  misc_feature 1..22: note = Targeting domain
  source 1..22: mol_type = other RNA
tccattccaaggaacaaaagcc

SEQ ID NO: 1976 - RNA, 18 nt, synthetic construct
  misc_feature 1..18: note = Targeting domain
  source 1..18: mol_type = other RNA
ttccaaggaacaaaagcc

SEQ ID NO: 1977 - RNA, 23 nt, synthetic construct
  misc_feature 1..23: note = Targeting domain
  source 1..23: mol_type = other RNA
tccctttctcttacccctgtacc

SEQ ID NO: 1978 - RNA, 19 nt, synthetic construct
  misc_feature 1..19: note = Targeting domain
  source 1..19: mol_type = other RNA
tttctcttacccctgtacc

SEQ ID NO: 1979 - RNA, 18 nt, synthetic construct
  misc_feature 1..18: note = Targeting domain
  source 1..18: mol_type = other RNA
ttctcttacccctgtacc

SEQ ID NO: 1980 - RNA, 19 nt, synthetic construct
  misc_feature 1..19: note = Targeting domain
  source 1..19: mol_type = other RNA
tttctaatgctggagagga

SEQ ID NO: 1981 - RNA, 18 nt, synthetic construct
  misc_feature 1..18: note = Targeting domain
  source 1..18: mol_type = other RNA
ttctaatgctggagagga

SEQ ID NO: 1982 - RNA, 24 nt, synthetic construct
  misc_feature 1..24: note = Targeting domain
  source 1..24: mol_type = other RNA
tctaatgctggagaggataggaca

SEQ ID NO: 1983 - RNA, 22 nt, synthetic construct
  misc_feature 1..22: note = Targeting domain
  source 1..22: mol_type = other RNA
taatgctggagaggataggaca

SEQ ID NO: 1984 - RNA, 19 nt, synthetic construct
  misc_feature 1..19: note = Targeting domain
  source 1..19: mol_type = other RNA
tgctggagaggataggaca

SEQ ID NO: 1985 - RNA, 24 nt, synthetic construct
  misc_feature 1..24: note = Targeting domain
  source 1..24: mol_type = other RNA
tatcataagttacaatctgtgaat

SEQ ID NO: 1986 - RNA, 22 nt, synthetic construct
  misc_feature 1..22: note = Targeting domain
  source 1..22: mol_type = other RNA
tcataagttacaatctgtgaat

SEQ ID NO: 1987 - RNA, 19 nt, synthetic construct
  misc_feature 1..19: note = Targeting domain
  source 1..19: mol_type = other RNA
taagttacaatctgtgaat

SEQ ID NO: 1988 - RNA, 24 nt, synthetic construct
  misc_feature 1..24: note = Targeting domain
  source 1..24: mol_type = other RNA
tttaaccagacatctaagagaaaa

SEQ ID NO: 1989 - RNA, 23 nt, synthetic construct
  misc_feature 1..23: note = Targeting domain
  source 1..23: mol_type = other RNA
ttaaccagacatctaagagaaaa

SEQ ID NO: 1990 - RNA, 22 nt, synthetic construct
  misc_feature 1..22: note = Targeting domain
  source 1..22: mol_type = other RNA
taaccagacatctaagagaaaa

SEQ ID NO: 1991 - RNA, 19 nt, synthetic construct
  misc_feature 1..19: note = Targeting domain
  source 1..19: mol_type = other RNA
tctatttctgatgaggaag

SEQ ID NO: 1992 - RNA, 24 nt, synthetic construct
  misc_feature 1..24: note = Targeting domain
  source 1..24: mol_type = other RNA
tctgatgaggaagatgaacaaatc

SEQ ID NO: 1993 - RNA, 22 nt, synthetic construct
  misc_feature 1..22: note = Targeting domain
  source 1..22: mol_type = other RNA
tgatgaggaagatgaacaaatc

SEQ ID NO: 1994 - RNA, 19 nt, synthetic construct
  misc_feature 1..19: note = Targeting domain
  source 1..19: mol_type = other RNA
tgaggaagatgaacaaatc

SEQ ID NO: 1995 - RNA, 24 nt, synthetic construct
  misc_feature 1..24: note = Targeting domain
  source 1..24: mol_type = other RNA
ttttcatttactgaatgtgtctct

SEQ ID NO: 1996 - RNA, 23 nt, synthetic construct
  misc_feature 1..23: note = Targeting domain
  source 1..23: mol_type = other RNA
tttcatttactgaatgtgtctct

SEQ ID NO: 1997 - RNA, 22 nt, synthetic construct
  misc_feature 1..22: note = Targeting domain
  source 1..22: mol_type = other RNA
ttcatttactgaatgtgtctct

SEQ ID NO: 1998 - RNA, 21 nt, synthetic construct
  misc_feature 1..21: note = Targeting domain
  source 1..21: mol_type = other RNA
tcatttactgaatgtgtctct

SEQ ID NO: 1999 - RNA, 18 nt, synthetic construct
  misc_feature 1..18: note = Targeting domain
  source 1..18: mol_type = other RNA
tttactgaatgtgtctct

SEQ ID NO: 2000 - RNA, 24 nt, synthetic construct
  misc_feature 1..24: note = Targeting domain
  source 1..24: mol_type = other RNA
tgggtacaggggtaagagaaaggg

SEQ ID NO: 2001 - RNA, 20 nt, synthetic construct
  misc_feature 1..20: note = Targeting domain
  source 1..20: mol_type = other RNA
tacaggggtaagagaaaggg

SEQ ID NO: 2002 - RNA, 24 nt, synthetic construct
  misc_feature 1..24: note = Targeting domain
  source 1..24: mol_type = other RNA
tgtgtgtgtgtgtgtgtgttatgt

SEQ ID NO: 2003 - RNA, 22 nt, synthetic construct
  misc_feature 1..22: note = Targeting domain
  source 1..22: mol_type = other RNA
tgtgtgtgtgtgtgtgttatgt

SEQ ID NO: 2004 - skipped

SEQ ID NO: 2005 - RNA, 18 nt, synthetic construct
  misc_feature 1..18: note = Targeting domain
  source 1..18: mol_type = other RNA
tgtgtgtgtgtgttatgt

SEQ ID NO: 2006 - RNA, 24 nt, synthetic construct
  misc_feature 1..24: note = Targeting domain
  source 1..24: mol_type = other RNA
atttacagagtgcatccatggtcc

SEQ ID NO: 2007 - skipped

SEQ ID NO: 2008 - RNA, 18 nt, synthetic construct
  misc_feature 1..18: note = Targeting domain
  source 1..18: mol_type = other RNA
agagtgcatccatggtcc

SEQ ID NO: 2009 - RNA, 21 nt, synthetic construct
  misc_feature 1..21: note = Targeting domain
  source 1..21: mol_type = other RNA
acttgaactctatacctttta

SEQ ID NO: 2010 - RNA, 22 nt, synthetic construct
  misc_feature 1..22: note = CEP290-1203 targeting domain (RNA)
  source 1..22: mol_type = other RNA
agctaaatcatgcaagtgacct

SEQ ID NO: 2011 - RNA, 18 nt, synthetic construct
  misc_feature 1..18: note = Targeting domain
  source 1..18: mol_type = other RNA
aaatcatgcaagtgacct

SEQ ID NO: 2012 - RNA, 24 nt, synthetic construct
  misc_feature 1..24: note = Targeting domain
  source 1..24: mol_type = other RNA
atccataagcctctatttctgatg

SEQ ID NO: 2013 - skipped

SEQ ID NO: 2014 - RNA, 18 nt, synthetic construct
  misc_feature 1..18: note = Targeting domain
  source 1..18: mol_type = other RNA
aagcctctatttctgatg

SEQ ID NO: 2015 - RNA, 20 nt, synthetic construct
  misc_feature 1..20: note = Targeting domain
  source 1..20: mol_type = other RNA
agaatagtttgttctgggta

SEQ ID NO: 2016 - RNA, 18 nt, synthetic construct
  misc_feature 1..18: note = Targeting domain
  source 1..18: mol_type = other RNA
aatagtttgttctgggta

SEQ ID NO: 2017 - RNA, 24 nt, synthetic construct
  misc_feature 1..24: note = Targeting domain
  source 1..24: mol_type = other RNA
aggagaatgatctagataatcatt

SEQ ID NO: 2018 - RNA, 21 nt, synthetic construct
  misc_feature 1..21: note = Targeting domain
  source 1..21: mol_type = other RNA
agaatgatctagataatcatt

SEQ ID NO: 2019 - RNA, 19 nt, synthetic construct
  misc_feature 1..19: note = Targeting domain
  source 1..19: mol_type = other RNA
aatgatctagataatcatt

SEQ ID NO: 2020 - RNA, 18 nt, synthetic construct
  misc_feature 1..18: note = Targeting domain
  source 1..18: mol_type = other RNA
atgatctagataatcatt

SEQ ID NO: 2021 - RNA, 19 nt, synthetic construct
  misc_feature 1..19: note = Targeting domain
  source 1..19: mol_type = other RNA
aatgctggagaggatagga

SEQ ID NO: 2022 - RNA, 18 nt, synthetic construct
  misc_feature 1..18: note = Targeting domain
  source 1..18: mol_type = other RNA
atgctggagaggatagga

SEQ ID NO: 2023 - RNA, 24 nt, synthetic construct
  misc_feature 1..24: note = Targeting domain
  source 1..24: mol_type = other RNA
aaaatccataagcctctatttctg

SEQ ID NO: 2024 - RNA, 23 nt, synthetic construct
  misc_feature 1..23: note = Targeting domain
  source 1..23: mol_type = other RNA
aaatccataagcctctatttctg

SEQ ID NO: 2025 - RNA, 22 nt, synthetic construct
  misc_feature 1..22: note = Targeting domain
  source 1..22: mol_type = other RNA
aatccataagcctctatttctg

SEQ ID NO: 2026 - RNA, 21 nt, synthetic construct
  misc_feature 1..21: note = Targeting domain
  source 1..21: mol_type = other RNA
atccataagcctctatttctg

SEQ ID NO: 2027 - RNA, 23 nt, synthetic construct
  misc_feature 1..23: note = Targeting domain
  source 1..23: mol_type = other RNA
aaacaggtagaatattgtaatca

SEQ ID NO: 2028 - RNA, 22 nt, synthetic construct
  misc_feature 1..22: note = Targeting domain
  source 1..22: mol_type = other RNA
aacaggtagaatattgtaatca

SEQ ID NO: 2029 - RNA, 21 nt, synthetic construct
  misc_feature 1..21: note = Targeting domain
  source 1..21: mol_type = other RNA
acaggtagaatattgtaatca

SEQ ID NO: 2030 - RNA, 19 nt, synthetic construct
  misc_feature 1..19: note = Targeting domain
  source 1..19: mol_type = other RNA
aggtagaatattgtaatca

SEQ ID NO: 2031 - RNA, 22 nt, synthetic construct
  misc_feature 1..22: note = CEP290-1224 targeting domain (RNA)
  source 1..22: mol_type = other RNA
aaggaacaaaagccagggacca

SEQ ID NO: 2032 - RNA, 21 nt, synthetic construct
  misc_feature 1..21: note = CEP290-1225 targeting domain (RNA)
  source 1..21: mol_type = other RNA
aggaacaaaagccagggacca

SEQ ID NO: 2033 - RNA, 18 nt, synthetic construct
  misc_feature 1..18: note = Targeting domain
  source 1..18: mol_type = other RNA
aacaaaagccagggacca

SEQ ID NO: 2034 - RNA, 24 nt, synthetic construct
  misc_feature 1..24: note = Targeting domain
  source 1..24: mol_type = other RNA
aggtagaatattgtaatcaaagga

SEQ ID NO: 2035 - skipped

SEQ ID NO: 2036 - RNA, 18 nt, synthetic construct
  misc_feature 1..18: note = Targeting domain
  source 1..18: mol_type = other RNA
aatattgtaatcaaagga

SEQ ID NO: 2037 - RNA, 22 nt, synthetic construct
  misc_feature 1..22: note = CEP290-1230 targeting domain (RNA)
  source 1..22: mol_type = other RNA
agtcatgtttatcaatattatt

SEQ ID NO: 2038 - RNA, 18 nt, synthetic construct
  misc_feature 1..18: note = Targeting domain
  source 1..18: mol_type = other RNA
atgtttatcaatattatt

SEQ ID NO: 2039 - RNA, 20 nt, synthetic construct
  misc_feature 1..20: note = Targeting domain
  source 1..20: mol_type = other RNA
aaccagacatctaagagaaa

SEQ ID NO: 2040 - RNA, 19 nt, synthetic construct
  misc_feature 1..19: note = Targeting domain
  source 1..19: mol_type = other RNA
accagacatctaagagaaa

SEQ ID NO: 2041 - RNA, 22 nt, synthetic construct
  misc_feature 1..22: note = Targeting domain
  source 1..22: mol_type = other RNA
attcttatctaagatcctttca

SEQ ID NO: 2042 - RNA, 24 nt, synthetic construct
  misc_feature 1..24: note = CEP290-1235 targeting domain (RNA)
  source 1..24: mol_type = other RNA
aaacaggtagaatattgtaatcaa

SEQ ID NO: 2043 - RNA, 23 nt, synthetic construct
  misc_feature 1..23: note = CEP290-1236 targeting domain (RNA)
  source 1..23: mol_type = other RNA
aacaggtagaatattgtaatcaa

SEQ ID NO: 2044 - RNA, 22 nt, synthetic construct
  misc_feature 1..22: note = Targeting domain
  source 1..22: mol_type = other RNA
acaggtagaatattgtaatcaa

SEQ ID NO: 2045 - skipped

SEQ ID NO: 2046 - RNA, 19 nt, synthetic construct
  misc_feature 1..19: note = Targeting domain
  source 1..19: mol_type = other RNA
atgaggaagatgaacaaat

SEQ ID NO: 2047 - RNA, 19 nt, synthetic construct
  misc_feature 1..19: note = Targeting domain
  source 1..19: mol_type = other RNA
agaggataggacagaggac

SEQ ID NO: 2048 - RNA, 19 nt, synthetic construct
  misc_feature 1..19: note = Targeting domain
  source 1..19: mol_type = other RNA
cagagtgcatccatggtcc

SEQ ID NO: 2049 - RNA, 24 nt, synthetic construct
  misc_feature 1..24: note = Targeting domain
  source 1..24: mol_type = other RNA
cttgcctaggactttctaatgctg

SEQ ID NO: 2050 - skipped

SEQ ID NO: 2051 - RNA, 19 nt, synthetic construct
  misc_feature 1..19: note = Targeting domain
  source 1..19: mol_type = other RNA
ctaggactttctaatgctg

SEQ ID NO: 2052 - RNA, 23 nt, synthetic construct
  misc_feature 1..23: note = CEP290-1245 targeting domain (RNA)
  source 1..23: mol_type = other RNA
ccacttgaactctatacctttta

SEQ ID NO: 2053 - RNA, 22 nt, synthetic construct
  misc_feature 1..22: note = Targeting domain
  source 1..22: mol_type = other RNA
cacttgaactctatacctttta

SEQ ID NO: 2054 - RNA, 20 nt, synthetic construct
  misc_feature 1..20: note = Targeting domain
  source 1..20: mol_type = other RNA
cttgaactctatacctttta

SEQ ID NO: 2055 - RNA, 23 nt, synthetic construct
  misc_feature 1..23: note = Targeting domain
  source 1..23: mol_type = other RNA
cagctaaatcatgcaagtgacct

SEQ ID NO: 2056 - RNA, 20 nt, synthetic construct
  misc_feature 1..20: note = Targeting domain
  source 1..20: mol_type = other RNA
ctaaatcatgcaagtgacct

SEQ ID NO: 2057 - RNA, 23 nt, synthetic construct
  misc_feature 1..23: note = Targeting domain
  source 1..23: mol_type = other RNA
ctcttgcctaggactttctaatg

SEQ ID NO: 2058 - RNA, 21 nt, synthetic construct
  misc_feature 1..21: note = Targeting domain
  source 1..21: mol_type = other RNA
cttgcctaggactttctaatg

SEQ ID NO: 2059 - RNA, 22 nt, synthetic construct
  misc_feature 1..22: note = Targeting domain
  source 1..22: mol_type = other RNA
ccataagcctctatttctgatg

SEQ ID NO: 2060 - RNA, 21 nt, synthetic construct
  misc_feature 1..21: note = Targeting domain
  source 1..21: mol_type = other RNA
cataagcctctatttctgatg

SEQ ID NO: 2061 - RNA, 21 nt, synthetic construct
  misc_feature 1..21: note = Targeting domain
  source 1..21: mol_type = other RNA
ctaatgctggagaggatagga

SEQ ID NO: 2062 - RNA, 19 nt, synthetic construct
  misc_feature 1..19: note = Targeting domain
  source 1..19: mol_type = other RNA
ccataagcctctatttctg

SEQ ID NO: 2063 - RNA, 18 nt, synthetic construct
  misc_feature 1..18: note = Targeting domain
  source 1..18: mol_type = other RNA
cataagcctctatttctg

SEQ ID NO: 2064 - RNA, 20 nt, synthetic construct
  misc_feature 1..20: note = Targeting domain
  source 1..20: mol_type = other RNA
caggtagaatattgtaatca

SEQ ID NO: 2065 - RNA, 21 nt, synthetic construct
  misc_feature 1..21: note = Targeting domain
  source 1..21: mol_type = other RNA
ctttctgctgcttttgccaaa

SEQ ID NO: 2066 - RNA, 24 nt, synthetic construct
  misc_feature 1..24: note = Targeting domain
  source 1..24: mol_type = other RNA
ccaaggaacaaaagccagggacca

SEQ ID NO: 2067 - RNA, 23 nt, synthetic construct
  misc_feature 1..23: note = Targeting domain
  source 1..23: mol_type = other RNA
caaggaacaaaagccagggacca

SEQ ID NO: 2068 - RNA, 19 nt, synthetic construct
  misc_feature 1..19: note = Targeting domain
  source 1..19: mol_type = other RNA
ctcttagatgtctggttaa

SEQ ID NO: 2069 - RNA, 19 nt, synthetic construct
  misc_feature 1..19: note = Targeting domain
  source 1..19: mol_type = other RNA
catgtttatcaatattatt

SEQ ID NO: 2070 - RNA, 18 nt, synthetic construct
  misc_feature 1..18: note = Targeting domain
  source 1..18: mol_type = other RNA
ccagacatctaagagaaa

SEQ ID NO: 2071 - RNA, 19 nt, synthetic construct
  misc_feature 1..19: note = Targeting domain
  source 1..19: mol_type = other RNA
cttatctaagatcctttca

SEQ ID NO: 2072 - RNA, 21 nt, synthetic construct
  misc_feature 1..21: note = Targeting domain
  source 1..21: mol_type = other RNA
caggtagaatattgtaatcaa

SEQ ID NO: 2073 - RNA, 22 nt, synthetic construct
  misc_feature 1..22: note = Targeting domain
  source 1..22: mol_type = other RNA
ctgatgaggaagatgaacaaat

SEQ ID NO: 2074 - RNA, 23 nt, synthetic construct
  misc_feature 1..23: note = Targeting domain
  source 1..23: mol_type = other RNA
ctggagaggataggacagaggac

SEQ ID NO: 2075 - RNA, 18 nt, synthetic construct
  misc_feature 1..18: note = Targeting domain
  source 1..18: mol_type = other RNA
catcttcctcatcagaaa

SEQ ID NO: 2076 - RNA, 21 nt, synthetic construct
  misc_feature 1..21: note = Targeting domain
  source 1..21: mol_type = other RNA
gcctaggactttctaatgctg

SEQ ID NO: 2077 - RNA, 24 nt, synthetic construct
  misc_feature 1..24: note = CEP290-1270 targeting domain (RNA)
  source 1..24: mol_type = other RNA
gccacttgaactctatacctttta

SEQ ID NO: 2078 - RNA, 21 nt, synthetic construct
  misc_feature 1..21: note = Targeting domain
  source 1..21: mol_type = other RNA
gctaaatcatgcaagtgacct

SEQ ID NO: 2079 - RNA, 18 nt, synthetic construct
  misc_feature 1..18: note = Targeting domain
  source 1..18: mol_type = other RNA
gcctaggactttctaatg

SEQ ID NO: 2080 - RNA, 23 nt, synthetic construct
  misc_feature 1..23: note = Targeting domain
  source 1..23: mol_type = other RNA
gggagaatagtttgttctgggta

SEQ ID NO: 2081 - RNA, 22 nt, synthetic construct
  misc_feature 1..22: note = Targeting domain
  source 1..22: mol_type = other RNA
ggagaatagtttgttctgggta

SEQ ID NO: 2082 - RNA, 21 nt, synthetic construct
  misc_feature 1..21: note = Targeting domain
  source 1..21: mol_type = other RNA
gagaatagtttgttctgggta

SEQ ID NO: 2083 - RNA, 19 nt, synthetic construct
  misc_feature 1..19: note = Targeting domain
  source 1..19: mol_type = other RNA
gaatagtttgttctgggta

SEQ ID NO: 2084 - RNA, 23 nt, synthetic construct
  misc_feature 1..23: note = Targeting domain
  source 1..23: mol_type = other RNA
ggagaatgatctagataatcatt

SEQ ID NO: 2085 - RNA, 22 nt, synthetic construct
  misc_feature 1..22: note = Targeting domain
  source 1..22: mol_type = other RNA
gagaatgatctagataatcatt

SEQ ID NO: 2086 - RNA, 20 nt, synthetic construct
  misc_feature 1..20: note = Targeting domain
  source 1..20: mol_type = other RNA
gaatgatctagataatcatt

SEQ ID NO: 2087 - RNA, 24 nt, synthetic construct
  misc_feature 1..24: note = Targeting domain
  source 1..24: mol_type = other RNA
gaaacaggtagaatattgtaatca

SEQ ID NO: 2088 - RNA, 18 nt, synthetic construct
  misc_feature 1..18: note = Targeting domain
  source 1..18: mol_type = other RNA
ggtagaatattgtaatca

SEQ ID NO: 2089 - RNA, 22 nt, synthetic construct
  misc_feature 1..22: note = Targeting domain
  source 1..22: mol_type = other RNA
gctttctgctgcttttgccaaa

SEQ ID NO: 2090 - RNA, 19 nt, synthetic construct
  misc_feature 1..19: note = Targeting domain
  source 1..19: mol_type = other RNA
gaacaaaagccagggacca

SEQ ID NO: 2091 - RNA, 23 nt, synthetic construct
  misc_feature 1..23: note = Targeting domain
  source 1..23: mol_type = other RNA
ggtagaatattgtaatcaaagga

SEQ ID NO: 2092 - RNA, 22 nt, synthetic construct
  misc_feature 1..22: note = Targeting domain
  source 1..22: mol_type = other RNA
gtagaatattgtaatcaaagga

SEQ ID NO: 2093 - RNA, 19 nt, synthetic construct
  misc_feature 1..19: note = Targeting domain
  source 1..19: mol_type = other RNA
gaatattgtaatcaaagga

SEQ ID NO: 2094 - RNA, 23 nt, synthetic construct
  misc_feature 1..23: note = Targeting domain
  source 1..23: mol_type = other RNA
gagtcatgtttatcaatattatt

SEQ ID NO: 2095 - RNA, 21 nt, synthetic construct
  misc_feature 1..21: note = Targeting domain
  source 1..21: mol_type = other RNA
gtcatgtttatcaatattatt

SEQ ID NO: 2096 - RNA, 19 nt, synthetic construct
  misc_feature 1..19: note = Targeting domain
  source 1..19: mol_type = other RNA
ggtagaatattgtaatcaa

SEQ ID NO: 2097 - RNA, 18 nt, synthetic construct
  misc_feature 1..18: note = Targeting domain
  source 1..18: mol_type = other RNA
gtagaatattgtaatcaa

SEQ ID NO: 2098 - skipped

SEQ ID NO: 2099 - RNA, 24 nt, synthetic construct
  misc_feature 1..24: note = Targeting domain
  source 1..24: mol_type = other RNA
gctggagaggataggacagaggac

SEQ ID NO: 2100 - RNA, 21 nt, synthetic construct
  misc_feature 1..21: note = Targeting domain
  source 1..21: mol_type = other RNA
ggagaggataggacagaggac

SEQ ID NO: 2101 - skipped

SEQ ID NO: 2102 - RNA, 18 nt, synthetic construct
  misc_feature 1..18: note = Targeting domain
  source 1..18: mol_type = other RNA
gaggataggacagaggac

SEQ ID NO: 2103 - RNA, 21 nt, synthetic construct
  misc_feature 1..21: note = Targeting domain
  source 1..21: mol_type = other RNA
gttcatcttcctcatcagaaa

SEQ ID NO: 2104 - RNA, 23 nt, synthetic construct
  misc_feature 1..23: note = Targeting domain
  source 1..23: mol_type = other RNA
tttacagagtgcatccatggtcc

SEQ ID NO: 2105 - RNA, 22 nt, synthetic construct
  misc_feature 1..22: note = Targeting domain
  source 1..22: mol_type = other RNA
ttacagagtgcatccatggtcc

SEQ ID NO: 2106 - RNA, 21 nt, synthetic construct
  misc_feature 1..21: note = Targeting domain
  source 1..21: mol_type = other RNA
tacagagtgcatccatggtcc

SEQ ID NO: 2107 - RNA, 23 nt, synthetic construct
  misc_feature 1..23: note = Targeting domain
  source 1..23: mol_type = other RNA
ttgcctaggactttctaatgctg

SEQ ID NO: 2108 - RNA, 22 nt, synthetic construct
  misc_feature 1..22: note = Targeting domain
  source 1..22: mol_type = other RNA
tgcctaggactttctaatgctg

SEQ ID NO: 2109 - RNA, 18 nt, synthetic construct
  misc_feature 1..18: note = Targeting domain
  source 1..18: mol_type = other RNA
taggactttctaatgctg

SEQ ID NO: 2110 - RNA, 19 nt, synthetic construct
  misc_feature 1..19: note = Targeting domain
  source 1..19: mol_type = other RNA
ttgaactctatacctttta

SEQ ID NO: 2111 - RNA, 18 nt, synthetic construct
  misc_feature 1..18: note = Targeting domain
  source 1..18: mol_type = other RNA
tgaactctatacctttta

SEQ ID NO: 2112 - RNA, 24 nt, synthetic construct
  misc_feature 1..24: note = Targeting domain
  source 1..24: mol_type = other RNA
tcagctaaatcatgcaagtgacct

SEQ ID NO: 2113 - RNA, 19 nt, synthetic construct
  misc_feature 1..19: note = Targeting domain
  source 1..19: mol_type = other RNA
taaatcatgcaagtgacct

SEQ ID NO: 2114 - RNA, 24 nt, synthetic construct
  misc_feature 1..24: note = Targeting domain
  source 1..24: mol_type = other RNA
tctcttgcctaggactttctaatg

SEQ ID NO: 2115 - RNA, 22 nt, synthetic construct
  misc_feature 1..22: note = Targeting domain
  source 1..22: mol_type = other RNA
tcttgcctaggactttctaatg

SEQ ID NO: 2116 - skipped

SEQ ID NO: 2117 - RNA, 19 nt, synthetic construct
  misc_feature 1..19: note = Targeting domain
  source 1..19: mol_type = other RNA
tgcctaggactttctaatg

SEQ ID NO: 2118 - RNA, 23 nt, synthetic construct
  misc_feature 1..23: note = Targeting domain
  source 1..23: mol_type = other RNA
tccataagcctctatttctgatg

SEQ ID NO: 2119 - RNA, 19 nt, synthetic construct
  misc_feature 1..19: note = Targeting domain
  source 1..19: mol_type = other RNA
taagcctctatttctgatg

SEQ ID NO: 2120 - RNA, 24 nt, synthetic construct
  misc_feature 1..24: note = Targeting domain
  source 1..24: mol_type = other RNA
tgggagaatagtttgttctgggta

SEQ ID NO: 2121 - RNA, 24 nt, synthetic construct
  misc_feature 1..24: note = Targeting domain
  source 1..24: mol_type = other RNA
tttctaatgctggagaggatagga

SEQ ID NO: 2122 - RNA, 23 nt, synthetic construct
  misc_feature 1..23: note = Targeting domain
  source 1..23: mol_type = other RNA
ttctaatgctggagaggatagga

SEQ ID NO: 2123 - RNA, 22 nt, synthetic construct
  misc_feature 1..22: note = Targeting domain
  source 1..22: mol_type = other RNA
tctaatgctggagaggatagga

SEQ ID NO: 2124-2125 - skipped (2 entries)

SEQ ID NO: 2126 - RNA, 24 nt, synthetic construct
  misc_feature 1..24: note = Targeting domain
  source 1..24: mol_type = other RNA
ttgctttctgctgcttttgccaaa

SEQ ID NO: 2127 - RNA, 23 nt, synthetic construct
  misc_feature 1..23: note = Targeting domain
  source 1..23: mol_type = other RNA
tgctttctgctgcttttgccaaa

SEQ ID NO: 2128 - skipped

SEQ ID NO: 2129 - RNA, 19 nt, synthetic construct
  misc_feature 1..19: note = Targeting domain
  source 1..19: mol_type = other RNA
ttctgctgcttttgccaaa

SEQ ID NO: 2130 - RNA, 18 nt, synthetic construct
  misc_feature 1..18: note = Targeting domain
  source 1..18: mol_type = other RNA
tctgctgcttttgccaaa

SEQ ID NO: 2131 - RNA, 21 nt, synthetic construct
  misc_feature 1..21: note = Targeting domain
  source 1..21: mol_type = other RNA
tagaatattgtaatcaaagga

SEQ ID NO: 2132 - RNA, 24 nt, synthetic construct
  misc_feature 1..24: note = Targeting domain
  source 1..24: mol_type = other RNA
tttttctcttagatgtctggttaa

SEQ ID NO: 2133 - RNA, 23 nt, synthetic construct
  misc_feature 1..23: note = Targeting domain
  source 1..23: mol_type = other RNA
ttttctcttagatgtctggttaa

SEQ ID NO: 2134 - RNA, 22 nt, synthetic construct
  misc_feature 1..22: note = Targeting domain
  source 1..22: mol_type = other RNA
tttctcttagatgtctggttaa

SEQ ID NO: 2135 - RNA, 21 nt, synthetic construct
  misc_feature 1..21: note = Targeting domain
  source 1..21: mol_type = other RNA
ttctcttagatgtctggttaa

SEQ ID NO: 2136 - RNA, 20 nt, synthetic construct
  misc_feature 1..20: note = Targeting domain
  source 1..20: mol_type = other RNA
tctcttagatgtctggttaa

SEQ ID NO: 2137 - RNA, 18 nt, synthetic construct
  misc_feature 1..18: note = Targeting domain
  source 1..18: mol_type = other RNA
tcttagatgtctggttaa

SEQ ID NO: 2138 - RNA, 24 nt, synthetic construct
  misc_feature 1..24: note = Targeting domain
  source 1..24: mol_type = other RNA
tgagtcatgtttatcaatattatt

SEQ ID NO: 2139 - skipped

SEQ ID NO: 2140 - RNA, 24 nt, synthetic construct
  misc_feature 1..24: note = Targeting domain
  source 1..24: mol_type = other RNA
ttttaaccagacatctaagagaaa

SEQ ID NO: 2141 - RNA, 23 nt, synthetic construct
  misc_feature 1..23: note = Targeting domain
  source 1..23: mol_type = other RNA
tttaaccagacatctaagagaaa

SEQ ID NO: 2142 - RNA, 22 nt, synthetic construct
  misc_feature 1..22: note = Targeting domain
  source 1..22: mol_type = other RNA
ttaaccagacatctaagagaaa

SEQ ID NO: 2143 - RNA, 21 nt, synthetic construct
  misc_feature 1..21: note = Targeting domain
  source 1..21: mol_type = other RNA
taaccagacatctaagagaaa

SEQ ID NO: 2144 - RNA, 24 nt, synthetic construct
  misc_feature 1..24: note = Targeting domain
  source 1..24: mol_type = other RNA
ttattcttatctaagatcctttca

SEQ ID NO: 2145 - RNA, 23 nt, synthetic construct
  misc_feature 1..23: note = Targeting domain
  source 1..23: mol_type = other RNA
tattcttatctaagatcctttca

SEQ ID NO: 2146 - RNA, 21 nt, synthetic construct
  misc_feature 1..21: note = Targeting domain
  source 1..21: mol_type = other RNA
ttcttatctaagatcctttca

SEQ ID NO: 2147 - skipped

SEQ ID NO: 2148 - RNA, 18 nt, synthetic construct
  misc_feature 1..18: note = Targeting domain
  source 1..18: mol_type = other RNA
ttatctaagatcctttca

SEQ ID NO: 2149 - RNA, 24 nt, synthetic construct
  misc_feature 1..24: note = Targeting domain
  source 1..24: mol_type = other RNA
ttctgatgaggaagatgaacaaat

SEQ ID NO: 2150 - RNA, 23 nt, synthetic construct
  misc_feature 1..23: note = Targeting domain
  source 1..23: mol_type = other RNA
tctgatgaggaagatgaacaaat

SEQ ID NO: 2151 - RNA, 21 nt, synthetic construct
  misc_feature 1..21: note = Targeting domain
  source 1..21: mol_type = other RNA
tgatgaggaagatgaacaaat

SEQ ID NO: 2152 - RNA, 18 nt, synthetic construct
  misc_feature 1..18: note = Targeting domain
  source 1..18: mol_type = other RNA
tgaggaagatgaacaaat

SEQ ID NO: 2153 - RNA, 22 nt, synthetic construct
  misc_feature 1..22: note = Targeting domain
  source 1..22: mol_type = other RNA
tggagaggataggacagaggac

SEQ ID NO: 2154 - RNA, 24 nt, synthetic construct
  misc_feature 1..24: note = Targeting domain
  source 1..24: mol_type = other RNA
tttgttcatcttcctcatcagaaa

SEQ ID NO: 2155 - RNA, 23 nt, synthetic construct
  misc_feature 1..23: note = Targeting domain
  source 1..23: mol_type = other RNA
ttgttcatcttcctcatcagaaa

SEQ ID NO: 2156 - RNA, 22 nt, synthetic construct
  misc_feature 1..22: note = Targeting domain
  source 1..22: mol_type = other RNA
tgttcatcttcctcatcagaaa

SEQ ID NO: 2157 - skipped

SEQ ID NO: 2158 - RNA, 19 nt, synthetic construct
  misc_feature 1..19: note = Targeting domain
  source 1..19: mol_type = other RNA
tcatcttcctcatcagaaa

SEQ ID NO: 2159 - RNA, 23 nt, synthetic construct
  misc_feature 1..23: note = Targeting domain
  source 1..23: mol_type = other RNA
acttacctcatgtcatctagagc

SEQ ID NO: 2160 - RNA, 19 nt, synthetic construct
  misc_feature 1..19: note = Targeting domain
  source 1..19: mol_type = other RNA
acctcatgtcatctagagc

SEQ ID NO: 2161 - RNA, 24 nt, synthetic construct
  misc_feature 1..24: note = Targeting domain
  source 1..24: mol_type = other RNA
acagtttttaaggcggggagtcac

SEQ ID NO: 2162 - RNA, 22 nt, synthetic construct
  misc_feature 1..22: note = Targeting domain
  source 1..22: mol_type = other RNA
agtttttaaggcggggagtcac

SEQ ID NO: 2163 - RNA, 19 nt, synthetic construct
  misc_feature 1..19: note = Targeting domain
  source 1..19: mol_type = other RNA
acagagttcaagctaatac

SEQ ID NO: 2164 - RNA, 24 nt, synthetic construct
  misc_feature 1..24: note = Targeting domain
  source 1..24: mol_type = other RNA
attagcttgaactctgtgccaaac

SEQ ID NO: 2165 - RNA, 21 nt, synthetic construct
  misc_feature 1..21: note = Targeting domain
  source 1..21: mol_type = other RNA
agcttgaactctgtgccaaac

SEQ ID NO: 2166 - RNA, 22 nt, synthetic construct
  misc_feature 1..22: note = Targeting domain
  source 1..22: mol_type = other RNA
atgtggtgtcaaatatggtgct

SEQ ID NO: 2167 - RNA, 23 nt, synthetic construct
  misc_feature 1..23: note = Targeting domain
  source 1..23: mol_type = other RNA
atgtggtgtcaaatatggtgctt

SEQ ID NO: 2168 - RNA, 18 nt, synthetic construct
  misc_feature 1..18: note = Targeting domain
  source 1..18: mol_type = other RNA
agatgacatgaggtaagt

SEQ ID NO: 2169 - RNA, 22 nt, synthetic construct
  misc_feature 1..22: note = Targeting domain
  source 1..22: mol_type = other RNA
aatacatgagagtgattagtgg

SEQ ID NO: 2170 - RNA, 21 nt, synthetic construct
  misc_feature 1..21: note = Targeting domain
  source 1..21: mol_type = other RNA
atacatgagagtgattagtgg

SEQ ID NO: 2171 - RNA, 19 nt, synthetic construct
  misc_feature 1..19: note = Targeting domain
  source 1..19: mol_type = other RNA
acatgagagtgattagtgg

SEQ ID NO: 2172-2175 - skipped (4 entries)

SEQ ID NO: 2176 - RNA, 23 nt, synthetic construct
  misc_feature 1..23: note = Targeting domain
  source 1..23: mol_type = other RNA
aaaggttcatgagactagaggtc

SEQ ID NO: 2177 - RNA, 22 nt, synthetic construct
  misc_feature 1..22: note = Targeting domain
  source 1..22: mol_type = other RNA
aaggttcatgagactagaggtc

SEQ ID NO: 2178 - RNA, 21 nt, synthetic construct
  misc_feature 1..21: note = Targeting domain
  source 1..21: mol_type = other RNA
aggttcatgagactagaggtc

SEQ ID NO: 2179 - RNA, 21 nt, synthetic construct
  misc_feature 1..21: note = Targeting domain
  source 1..21: mol_type = other RNA
aaacaggagatactcaacaca

SEQ ID NO: 2180 - skipped

SEQ ID NO: 2181 - RNA, 19 nt, synthetic construct
  misc_feature 1..19: note = Targeting domain
  source 1..19: mol_type = other RNA
acaggagatactcaacaca

SEQ ID NO: 2182 - RNA, 23 nt, synthetic construct
  misc_feature 1..23: note = Targeting domain
  source 1..23: mol_type = other RNA
agcacgtacaaaagaacatacat

SEQ ID NO: 2183 - skipped

SEQ ID NO: 2184 - RNA, 19 nt, synthetic construct
  misc_feature 1..19: note = Targeting domain
  source 1..19: mol_type = other RNA
agtaaggaggatgtaagac

SEQ ID NO: 2185 - RNA, 21 nt, synthetic construct
  misc_feature 1..21: note = Targeting domain
  source 1..21: mol_type = other RNA
agcttttgacagtttttaagg

SEQ ID NO: 2186 - RNA, 24 nt, synthetic construct
  misc_feature 1..24: note = Targeting domain
  source 1..24: mol_type = other RNA
aaattcactgagcaaaacaactgg

SEQ ID NO: 2187 - RNA, 23 nt, synthetic construct
  misc_feature 1..23: note = Targeting domain
  source 1..23: mol_type = other RNA
aattcactgagcaaaacaactgg

SEQ ID NO: 2188 - RNA, 22 nt, synthetic construct
  misc_feature 1..22: note = Targeting domain
  source 1..22: mol_type = other RNA
attcactgagcaaaacaactgg

SEQ ID NO: 2189 - RNA, 18 nt, synthetic construct
  misc_feature 1..18: note = Targeting domain
  source 1..18: mol_type = other RNA
actgagcaaaacaactgg

SEQ ID NO: 2190 - skipped

SEQ ID NO: 2191 - RNA, 19 nt, synthetic construct
  misc_feature 1..19: note = Targeting domain
  source 1..19: mol_type = other RNA
acaagttttgaaacaggaa

SEQ ID NO: 2192 - RNA, 22 nt, synthetic construct
  misc_feature 1..22: note = Targeting domain
  source 1..22: mol_type = other RNA
aatgcctgaacaagttttgaaa

SEQ ID NO: 2193 - RNA, 21 nt, synthetic construct
  misc_feature 1..21: note = Targeting domain
  source 1..21: mol_type = other RNA
atgcctgaacaagttttgaaa

SEQ ID NO: 2194 - RNA, 24 nt, synthetic construct
  misc_feature 1..24: note = Targeting domain
  source 1..24: mol_type = other RNA
attcactgagcaaaacaactggaa

SEQ ID NO: 2195 - skipped

SEQ ID NO: 2196 - RNA, 24 nt, synthetic construct
  misc_feature 1..24: note = Targeting domain
  source 1..24: mol_type = other RNA
aaaaaggtaatgcctgaacaagtt

SEQ ID NO: 2197 - RNA, 23 nt, synthetic construct
  misc_feature 1..23: note = Targeting domain
  source 1..23: mol_type = other RNA
aaaaggtaatgcctgaacaagtt

SEQ ID NO: 2198 - RNA, 22 nt, synthetic construct
  misc_feature 1..22: note = Targeting domain
  source 1..22: mol_type = other RNA
aaaggtaatgcctgaacaagtt

SEQ ID NO: 2199 - RNA, 21 nt, synthetic construct
  misc_feature 1..21: note = Targeting domain
  source 1..21: mol_type = other RNA
aaggtaatgcctgaacaagtt

SEQ ID NO: 2200 - skipped

SEQ ID NO: 2201 - RNA, 19 nt, synthetic construct
  misc_feature 1..19: note = Targeting domain
  source 1..19: mol_type = other RNA
acgtgctcttttctatata

SEQ ID NO: 2202 - RNA, 23 nt, synthetic construct
  misc_feature 1..23: note = Targeting domain
  source 1..23: mol_type = other RNA
attatctattccattcttcacac

SEQ ID NO: 2203 - RNA, 20 nt, synthetic construct
  misc_feature 1..20: note = Targeting domain
  source 1..20: mol_type = other RNA
atctattccattcttcacac

SEQ ID NO: 2204 - RNA, 24 nt, synthetic construct
  misc_feature 1..24: note = Targeting domain
  source 1..24: mol_type = other RNA
aagagagaaatggttccctatata

SEQ ID NO: 2205 - RNA, 23 nt, synthetic construct
  misc_feature 1..23: note = Targeting domain
  source 1..23: mol_type = other RNA
agagagaaatggttccctatata

SEQ ID NO: 2206 - RNA, 21 nt, synthetic construct
  misc_feature 1..21: note = Targeting domain
  source 1..21: mol_type = other RNA
agagaaatggttccctatata

SEQ ID NO: 2207 - RNA, 19 nt, synthetic construct
  misc_feature 1..19: note = Targeting domain
  source 1..19: mol_type = other RNA
agaaatggttccctatata

SEQ ID NO: 2208 - RNA, 19 nt, synthetic construct
  misc_feature 1..19: note = Targeting domain
  source 1..19: mol_type = other RNA
aggaaattattgttgcttt

SEQ ID NO: 2209 - RNA, 22 nt, synthetic construct
  misc_feature 1..22: note = Targeting domain
  source 1..22: mol_type = other RNA
actgagcaaaacaactggaaga

SEQ ID NO: 2210 - RNA, 18 nt, synthetic construct
  misc_feature 1..18: note = Targeting domain
  source 1..18: mol_type = other RNA
agcaaaacaactggaaga

SEQ ID NO: 2211 - RNA, 24 nt, synthetic construct
  misc_feature 1..24: note = Targeting domain
  source 1..24: mol_type = other RNA
atacataagaaagaacactgtggt

SEQ ID NO: 2212 - RNA, 22 nt, synthetic construct
  misc_feature 1..22: note = Targeting domain
  source 1..22: mol_type = other RNA
acataagaaagaacactgtggt

SEQ ID NO: 2213 - skipped

SEQ ID NO: 2214 - RNA, 18 nt, synthetic construct
  misc_feature 1..18: note = Targeting domain
  source 1..18: mol_type = other RNA
aagaaagaacactgtggt

SEQ ID NO: 2215 - RNA, 18 nt, synthetic construct
  misc_feature 1..18: note = Targeting domain
  source 1..18: mol_type = other RNA
aagaatggaatagataat

SEQ ID NO: 2216 - RNA, 22 nt, synthetic construct
  misc_feature 1..22: note = Targeting domain
  source 1..22: mol_type = other RNA
aaggaggatgtaagactggaga

SEQ ID NO: 2217 - RNA, 21 nt, synthetic construct
  misc_feature 1..21: note = Targeting domain
  source 1..21: mol_type = other RNA
aggaggatgtaagactggaga

SEQ ID NO: 2218 - RNA, 18 nt, synthetic construct
  misc_feature 1..18: note = Targeting domain
  source 1..18: mol_type = other RNA
aggatgtaagactggaga

SEQ ID NO: 2219 - RNA, 23 nt, synthetic construct
  misc_feature 1..23: note = Targeting domain
  source 1..23: mol_type = other RNA
aaaaacttgaaatttgatagtag

SEQ ID NO: 2220 - RNA, 22 nt, synthetic construct
  misc_feature 1..22: note = Targeting domain
  source 1..22: mol_type = other RNA
aaaacttgaaatttgatagtag

SEQ ID NO: 2221 - RNA, 21 nt, synthetic construct
  misc_feature 1..21: note = Targeting domain
  source 1..21: mol_type = other RNA
aaacttgaaatttgatagtag

SEQ ID NO: 2222 - RNA, 20 nt, synthetic construct
  misc_feature 1..20: note = Targeting domain
  source 1..20: mol_type = other RNA
aacttgaaatttgatagtag

SEQ ID NO: 2223 - RNA, 19 nt, synthetic construct
  misc_feature 1..19: note = Targeting domain
  source 1..19: mol_type = other RNA
acttgaaatttgatagtag

SEQ ID NO: 2224 - RNA, 18 nt, synthetic construct
  misc_feature 1..18: note = Targeting domain
  source 1..18: mol_type = other RNA
acatatctgtcttcctta

SEQ ID NO: 2225 - RNA, 18 nt, synthetic construct
  misc_feature 1..18: note = CEP290-1418 targeting domain (RNA)
  source 1..18: mol_type = other RNA
attaaaaaaagtatgctt

SEQ ID NO: 2226 - RNA, 24 nt, synthetic construct
  misc_feature 1..24: note = Targeting domain
  source 1..24: mol_type = other RNA
atatcaaaagacttatattccatt

SEQ ID NO: 2227 - RNA, 22 nt, synthetic construct
  misc_feature 1..22: note = Targeting domain
  source 1..22: mol_type = other RNA
atcaaaagacttatattccatt

SEQ ID NO: 2228 - RNA, 19 nt, synthetic construct
  misc_feature 1..19: note = Targeting domain
  source 1..19: mol_type = other RNA
aaaagacttatattccatt

SEQ ID NO: 2229 - RNA, 18 nt, synthetic construct
  misc_feature 1..18: note = Targeting domain
  source 1..18: mol_type = other RNA
aaagacttatattccatt

SEQ ID NO: 2230 - RNA, 24 nt, synthetic construct
  misc_feature 1..24: note = Targeting domain
  source 1..24: mol_type = other RNA
aaaatcagatttcatgtgtgaaga

SEQ ID NO: 2231 - RNA, 23 nt, synthetic construct
  misc_feature 1..23: note = Targeting domain
  source 1..23: mol_type = other RNA
aaatcagatttcatgtgtgaaga

SEQ ID NO: 2232 - RNA, 22 nt, synthetic construct
  misc_feature 1..22: note = Targeting domain
  source 1..22: mol_type = other RNA
aatcagatttcatgtgtgaaga

SEQ ID NO: 2233 - RNA, 21 nt, synthetic construct
  misc_feature 1..21: note = Targeting domain
  source 1..21: mol_type = other RNA
atcagatttcatgtgtgaaga

SEQ ID NO: 2234 - RNA, 18 nt, synthetic construct
  misc_feature 1..18: note = Targeting domain
  source 1..18: mol_type = other RNA
agatttcatgtgtgaaga

SEQ ID NO: 2235 - RNA, 24 nt, synthetic construct
  misc_feature 1..24: note = Targeting domain
  source 1..24: mol_type = other RNA
aatggaatataagtcttttgatat

SEQ ID NO: 2236 - RNA, 23 nt, synthetic construct
  misc_feature 1..23: note = Targeting domain
  source 1..23: mol_type = other RNA
atggaatataagtcttttgatat

SEQ ID NO: 2237 - RNA, 19 nt, synthetic construct
  misc_feature 1..19: note = Targeting domain
  source 1..19: mol_type = other RNA
aatataagtcttttgatat

SEQ ID NO: 2238 - RNA, 18 nt, synthetic construct
  misc_feature 1..18: note = Targeting domain
  source 1..18: mol_type = other RNA
atataagtcttttgatat

SEQ ID NO: 2239 - RNA, 19 nt, synthetic construct
  misc_feature 1..19: note = Targeting domain
  source 1..19: mol_type = other RNA
aagaatggaatagataata

SEQ ID NO: 2240 - RNA, 18 nt, synthetic construct
  misc_feature 1..18: note = Targeting domain
  source 1..18: mol_type = other RNA
agaatggaatagataata

SEQ ID NO: 2241 - RNA, 24 nt, synthetic construct
  misc_feature 1..24: note = Targeting domain
  source 1..24: mol_type = other RNA
aaaactggatgggtaataaagcaa

SEQ ID NO: 2242 - RNA, 23 nt, synthetic construct
  misc_feature 1..23: note = Targeting domain
  source 1..23: mol_type = other RNA
aaactggatgggtaataaagcaa

SEQ ID NO: 2243 - RNA, 22 nt, synthetic construct
  misc_feature 1..22: note = Targeting domain
  source 1..22: mol_type = other RNA
aactggatgggtaataaagcaa

SEQ ID NO: 2244 - RNA, 21 nt, synthetic construct
  misc_feature 1..21: note = Targeting domain
  source 1..21: mol_type = other RNA
actggatgggtaataaagcaa

SEQ ID NO: 2245 - RNA, 24 nt, synthetic construct
  misc_feature 1..24: note = Targeting domain
  source 1..24: mol_type = other RNA
atagaaattcactgagcaaaacaa

SEQ ID NO: 2246 - RNA, 22 nt, synthetic construct
  misc_feature 1..22: note = Targeting domain
  source 1..22: mol_type = other RNA
agaaattcactgagcaaaacaa

SEQ ID NO: 2247 - skipped

SEQ ID NO: 2248 - RNA, 19 nt, synthetic construct
  misc_feature 1..19: note = Targeting domain
  source 1..19: mol_type = other RNA
aattcactgagcaaaacaa

SEQ ID NO: 2249 - RNA, 18 nt, synthetic construct
  misc_feature 1..18: note = Targeting domain
  source 1..18: mol_type = other RNA
attcactgagcaaaacaa

SEQ ID NO: 2250 - RNA, 24 nt, synthetic construct
  misc_feature 1..24: note = Targeting domain
  source 1..24: mol_type = other RNA
aggatgtaagactggagatagaga

SEQ ID NO: 2251 - RNA, 21 nt, synthetic construct
  misc_feature 1..21: note = Targeting domain
  source 1..21: mol_type = other RNA
atgtaagactggagatagaga

SEQ ID NO: 2252 - RNA, 21 nt, synthetic construct
  misc_feature 1..21: note = Targeting domain
  source 1..21: mol_type = other RNA
aaatttgatagtagaagaaaa

SEQ ID NO: 2253 - RNA, 20 nt, synthetic construct
  misc_feature 1..20: note = Targeting domain
  source 1..20: mol_type = other RNA
aatttgatagtagaagaaaa

SEQ ID NO: 2254 - RNA, 19 nt, synthetic construct
  misc_feature 1..19: note = Targeting domain
  source 1..19: mol_type = other RNA
atttgatagtagaagaaaa

SEQ ID NO: 2255-2260 - skipped (6 entries)

SEQ ID NO: 2261 - RNA, 19 nt, synthetic construct
  misc_feature 1..19: note = Targeting domain
  source 1..19: mol_type = other RNA
aataaagcaaaagaaaaac

SEQ ID NO: 2262 - RNA, 18 nt, synthetic construct
  misc_feature 1..18: note = Targeting domain
  source 1..18: mol_type = other RNA
ataaagcaaaagaaaaac

SEQ ID NO: 2263 - RNA, 24 nt, synthetic construct
  misc_feature 1..24: note = Targeting domain
  source 1..24: mol_type = other RNA
attctttttttgttgttttttttt

SEQ ID NO: 2264 - RNA, 20 nt, synthetic construct
  misc_feature 1..20: note = Targeting domain
  source 1..20: mol_type = other RNA
actccagcctgggcaacaca

SEQ ID NO: 2265 - RNA, 22 nt, synthetic construct
  misc_feature 1..22: note = Targeting domain
  source 1..22: mol_type = other RNA
cttacctcatgtcatctagagc

SEQ ID NO: 2266 - RNA, 18 nt, synthetic construct
  misc_feature 1..18: note = Targeting domain
  source 1..18: mol_type = other RNA
cctcatgtcatctagagc

SEQ ID NO: 2267 - RNA, 23 nt, synthetic construct
  misc_feature 1..23: note = Targeting domain
  source 1..23: mol_type = other RNA
cagtttttaaggcggggagtcac

SEQ ID NO: 2268 - skipped

SEQ ID NO: 2269 - RNA, 18 nt, synthetic construct
  misc_feature 1..18: note = Targeting domain
  source 1..18: mol_type = other RNA
cagagttcaagctaatac

SEQ ID NO: 2270 - RNA, 19 nt, synthetic construct
  misc_feature 1..19: note = Targeting domain
  source 1..19: mol_type = other RNA
cttgaactctgtgccaaac

SEQ ID NO: 2271 - RNA, 23 nt, synthetic construct
  misc_feature 1..23: note = Targeting domain
  source 1..23: mol_type = other RNA
catgtggtgtcaaatatggtgct

SEQ ID NO: 2272 - RNA, 24 nt, synthetic construct
  misc_feature 1..24: note = Targeting domain
  source 1..24: mol_type = other RNA
catgtggtgtcaaatatggtgctt

SEQ ID NO: 2273 - RNA, 22 nt, synthetic construct
  misc_feature 1..22: note = Targeting domain
  source 1..22: mol_type = other RNA
ctctagatgacatgaggtaagt

SEQ ID NO: 2274 - skipped

SEQ ID NO: 2275 - RNA, 24 nt, synthetic construct
  misc_feature 1..24: note = Targeting domain
  source 1..24: mol_type = other RNA
ctaatacatgagagtgattagtgg

SEQ ID NO: 2276 - RNA, 18 nt, synthetic construct
  misc_feature 1..18: note = Targeting domain
  source 1..18: mol_type = other RNA
catgagagtgattagtgg

SEQ ID NO: 2277 - skipped

SEQ ID NO: 2278 - RNA, 23 nt, synthetic construct
  misc_feature 1..23: note = Targeting domain
  source 1..23: mol_type = other RNA
ccaaacaggagatactcaacaca

SEQ ID NO: 2279 - RNA, 22 nt, synthetic construct
  misc_feature 1..22: note = Targeting domain
  source 1..22: mol_type = other RNA
caaacaggagatactcaacaca

SEQ ID NO: 2280 - RNA, 18 nt, synthetic construct
  misc_feature 1..18: note = Targeting domain
  source 1..18: mol_type = other RNA
caggagatactcaacaca

SEQ ID NO: 2281 - RNA, 21 nt, synthetic construct
  misc_feature 1..21: note = Targeting domain
  source 1..21: mol_type = other RNA
cacgtacaaaagaacatacat

SEQ ID NO: 2282 - RNA, 19 nt, synthetic construct
  misc_feature 1..19: note = Targeting domain
  source 1..19: mol_type = other RNA
cgtacaaaagaacatacat

SEQ ID NO: 2283 - skipped

SEQ ID NO: 2284 - RNA, 19 nt, synthetic construct
  misc_feature 1..19: note = Targeting domain
  source 1..19: mol_type = other RNA
cttttgacagtttttaagg

SEQ ID NO: 2285 - RNA, 19 nt, synthetic construct
  misc_feature 1..19: note = Targeting domain
  source 1..19: mol_type = other RNA
cgtgctcttttctatatat

SEQ ID NO: 2286 - RNA, 19 nt, synthetic construct
  misc_feature 1..19: note = Targeting domain
  source 1..19: mol_type = other RNA
cactgagcaaaacaactgg

SEQ ID NO: 2287 - RNA, 24 nt, synthetic construct
  misc_feature 1..24: note = Targeting domain
  source 1..24: mol_type = other RNA
cctgaacaagttttgaaacaggaa

SEQ ID NO: 2288 - RNA, 23 nt, synthetic construct
  misc_feature 1..23: note = Targeting domain
  source 1..23: mol_type = other RNA
ctgaacaagttttgaaacaggaa

SEQ ID NO: 2289 - RNA, 18 nt, synthetic construct
  misc_feature 1..18: note = Targeting domain
  source 1..18: mol_type = other RNA
caagttttgaaacaggaa

SEQ ID NO: 2290 - RNA, 18 nt, synthetic construct
  misc_feature 1..18: note = Targeting domain
  source 1..18: mol_type = other RNA
cctgaacaagttttgaaa

SEQ ID NO: 2291 - RNA, 21 nt, synthetic construct
  misc_feature 1..21: note = Targeting domain
  source 1..21: mol_type = other RNA
cactgagcaaaacaactggaa

SEQ ID NO: 2292 - RNA, 19 nt, synthetic construct
  misc_feature 1..19: note = Targeting domain
  source 1..19: mol_type = other RNA
ctgagcaaaacaactggaa

SEQ ID NO: 2293 - RNA, 18 nt, synthetic construct
  misc_feature 1..18: note = Targeting domain
  source 1..18: mol_type = other RNA
cgtgctcttttctatata

SEQ ID NO: 2294 - RNA, 18 nt, synthetic construct
  misc_feature 1..18: note = Targeting domain
  source 1..18: mol_type = other RNA
ctattccattcttcacac

SEQ ID NO: 2295 - RNA, 22 nt, synthetic construct
  misc_feature 1..22: note = Targeting domain
  source 1..22: mol_type = other RNA
cttaggaaattattgttgcttt

SEQ ID NO: 2296 - RNA, 21 nt, synthetic construct
  misc_feature 1..21: note = CEP290-1488 targeting domain (RNA)
  source 1..21: mol_type = other RNA
ctttttgagaggtaaaggttc

SEQ ID NO: 2297 - RNA, 23 nt, synthetic construct
  misc_feature 1..23: note = Targeting domain
  source 1..23: mol_type = other RNA
cactgagcaaaacaactggaaga

SEQ ID NO: 2298 - RNA, 21 nt, synthetic construct
  misc_feature 1..21: note = Targeting domain
  source 1..21: mol_type = other RNA
ctgagcaaaacaactggaaga

SEQ ID NO: 2299 - RNA, 21 nt, synthetic construct
  misc_feature 1..21: note = Targeting domain
  source 1..21: mol_type = other RNA
cataagaaagaacactgtggt

SEQ ID NO: 2300 - RNA, 18 nt, synthetic construct
  misc_feature 1..18: note = CEP290-1492 targeting domain (RNA)
  source 1..18: mol_type = other RNA
cttgaaatttgatagtag

SEQ ID NO: 2301 - skipped

SEQ ID NO: 2302 - RNA, 19 nt, synthetic construct
  misc_feature 1..19: note = Targeting domain
  source 1..19: mol_type = other RNA
cattaaaaaaagtatgctt

SEQ ID NO: 2303 - skipped

SEQ ID NO: 2304 - RNA, 19 nt, synthetic construct
  misc_feature 1..19: note = Targeting domain
  source 1..19: mol_type = other RNA
cagatttcatgtgtgaaga

SEQ ID NO: 2305 - RNA, 20 nt, synthetic construct
  misc_feature 1..20: note = Targeting domain
  source 1..20: mol_type = other RNA
ctggatgggtaataaagcaa

SEQ ID NO: 2306 - RNA, 19 nt, synthetic construct
  misc_feature 1..19: note = Targeting domain
  source 1..19: mol_type = other RNA
cttaagcatacttttttta

SEQ ID NO: 2307 - RNA, 21 nt, synthetic construct
  misc_feature 1..21: note = Targeting domain
  source 1..21: mol_type = other RNA
ctttttttgttgttttttttt

SEQ ID NO: 2308 - RNA, 24 nt, synthetic construct
  misc_feature 1..24: note = Targeting domain
  source 1..24: mol_type = other RNA
ctgcactccagcctgggcaacaca

SEQ ID NO: 2309 - RNA, 21 nt, synthetic construct
  misc_feature 1..21: note = Targeting domain
  source 1..21: mol_type = other RNA
cactccagcctgggcaacaca

SEQ ID NO: 2310 - RNA, 19 nt, synthetic construct
  misc_feature 1..19: note = Targeting domain
  source 1..19: mol_type = other RNA
ctccagcctgggcaacaca

SEQ ID NO: 2311 - RNA, 21 nt, synthetic construct
  misc_feature 1..21: note = Targeting domain
  source 1..21: mol_type = other RNA
gtttttaaggcggggagtcac

SEQ ID NO: 2312 - RNA, 22 nt, synthetic construct
  misc_feature 1..22: note = CEP290-232 targeting domain (RNA)
  source 1..22: mol_type = other RNA
ggcacagagttcaagctaatac

SEQ ID NO: 2313 - RNA, 21 nt, synthetic construct
  misc_feature 1..21: note = Targeting domain
  source 1..21: mol_type = other RNA
gcacagagttcaagctaatac

SEQ ID NO: 2314 - RNA, 24 nt, synthetic construct
  misc_feature 1..24: note = Targeting domain
  source 1..24: mol_type = other RNA
gcatgtggtgtcaaatatggtgct

SEQ ID NO: 2315 - skipped

SEQ ID NO: 2316 - RNA, 18 nt, synthetic construct
  misc_feature 1..18: note = Targeting domain
  source 1..18: mol_type = other RNA
ggtgtcaaatatggtgct

SEQ ID NO: 2317 - RNA, 21 nt, synthetic construct
  misc_feature 1..21: note = Targeting domain
  source 1..21: mol_type = other RNA
gtggtgtcaaatatggtgctt

SEQ ID NO: 2318 - RNA, 19 nt, synthetic construct
  misc_feature 1..19: note = Targeting domain
  source 1..19: mol_type = other RNA
ggtgtcaaatatggtgctt

SEQ ID NO: 2319 - RNA, 18 nt, synthetic construct
  misc_feature 1..18: note = Targeting domain
  source 1..18: mol_type = other RNA
gtgtcaaatatggtgctt

SEQ ID NO: 2320 - RNA, 23 nt, synthetic construct
  misc_feature 1..23: note = Targeting domain
  source 1..23: mol_type = other RNA
gctctagatgacatgaggtaagt

SEQ ID NO: 2321 - skipped

SEQ ID NO: 2322 - RNA, 20 nt, synthetic construct
  misc_feature 1..20: note = Targeting domain
  source 1..20: mol_type = other RNA
ggttcatgagactagaggtc

SEQ ID NO: 2323 - RNA, 19 nt, synthetic construct
  misc_feature 1..19: note = Targeting domain
  source 1..19: mol_type = other RNA
gttcatgagactagaggtc

SEQ ID NO: 2324 - RNA, 24 nt, synthetic construct
  misc_feature 1..24: note = Targeting domain
  source 1..24: mol_type = other RNA
gccaaacaggagatactcaacaca

SEQ ID NO: 2325 - RNA, 24 nt, synthetic construct
  misc_feature 1..24: note = Targeting domain
  source 1..24: mol_type = other RNA
gagcacgtacaaaagaacatacat

SEQ ID NO: 2326 - RNA, 22 nt, synthetic construct
  misc_feature 1..22: note = Targeting domain
  source 1..22: mol_type = other RNA
gcacgtacaaaagaacatacat

SEQ ID NO: 2327 - RNA, 18 nt, synthetic construct
  misc_feature 1..18: note = Targeting domain
  source 1..18: mol_type = other RNA
gtacaaaagaacatacat

SEQ ID NO: 2328 - RNA, 24 nt, synthetic construct
  misc_feature 1..24: note = Targeting domain
  source 1..24: mol_type = other RNA
gtggcagtaaggaggatgtaagac

SEQ ID NO: 2329 - RNA, 22 nt, synthetic construct
  misc_feature 1..22: note = Targeting domain
  source 1..22: mol_type = other RNA
ggcagtaaggaggatgtaagac

SEQ ID NO: 2330 - RNA, 21 nt, synthetic construct
  misc_feature 1..21: note = Targeting domain
  source 1..21: mol_type = other RNA
gcagtaaggaggatgtaagac

SEQ ID NO: 2331 - RNA, 18 nt, synthetic construct
  misc_feature 1..18: note = Targeting domain
  source 1..18: mol_type = other RNA
gtaaggaggatgtaagac

SEQ ID NO: 2332 - RNA, 24 nt, synthetic construct
  misc_feature 1..24: note = Targeting domain
  source 1..24: mol_type = other RNA
ggtagcttttgacagtttttaagg

SEQ ID NO: 2333 - RNA, 23 nt, synthetic construct
  misc_feature 1..23: note = Targeting domain
  source 1..23: mol_type = other RNA
gtagcttttgacagtttttaagg

SEQ ID NO: 2334 - RNA, 22 nt, synthetic construct
  misc_feature 1..22: note = Targeting domain
  source 1..22: mol_type = other RNA
gtacgtgctcttttctatatat

SEQ ID NO: 2335 - RNA, 18 nt, synthetic construct
  misc_feature 1..18: note = Targeting domain
  source 1..18: mol_type = other RNA
gtgctcttttctatatat

SEQ ID NO: 2336 - RNA, 21 nt, synthetic construct
  misc_feature 1..21: note = Targeting domain
  source 1..21: mol_type = other RNA
gaacaagttttgaaacaggaa

SEQ ID NO: 2337 - RNA, 24 nt, synthetic construct
  misc_feature 1..24: note = Targeting domain
  source 1..24: mol_type = other RNA
gtaatgcctgaacaagttttgaaa

SEQ ID NO: 2338 - RNA, 19 nt, synthetic construct
  misc_feature 1..19: note = Targeting domain
  source 1..19: mol_type = other RNA
gcctgaacaagttttgaaa

SEQ ID NO: 2339 - RNA, 19 nt, synthetic construct
  misc_feature 1..19: note = Targeting domain
  source 1..19: mol_type = other RNA
ggtaatgcctgaacaagtt

SEQ ID NO: 2340 - RNA, 18 nt, synthetic construct
  misc_feature 1..18: note = Targeting domain
  source 1..18: mol_type = other RNA
gtaatgcctgaacaagtt

SEQ ID NO: 2341 - RNA, 21 nt, synthetic construct
  misc_feature 1..21: note = Targeting domain
  source 1..21: mol_type = other RNA
gtacgtgctcttttctatata

SEQ ID NO: 2342 - RNA, 22 nt, synthetic construct
  misc_feature 1..22: note = Targeting domain
  source 1..22: mol_type = other RNA
gagagaaatggttccctatata

SEQ ID NO: 2343 - skipped

SEQ ID NO: 2344 - RNA, 18 nt, synthetic construct
  misc_feature 1..18: note = Targeting domain
  source 1..18: mol_type = other RNA
gaaatggttccctatata

SEQ ID NO: 2345 - RNA, 23 nt, synthetic construct
  misc_feature 1..23: note = Targeting domain
  source 1..23: mol_type = other RNA
gcttaggaaattattgttgcttt

SEQ ID NO: 2346 - RNA, 18 nt, synthetic construct
  misc_feature 1..18: note = Targeting domain
  source 1..18: mol_type = other RNA
ggaaattattgttgcttt

SEQ ID NO: 2347 - RNA, 22 nt, synthetic construct
  misc_feature 1..22: note = Targeting domain
  source 1..22: mol_type = other RNA
gctttttgagaggtaaaggttc

SEQ ID NO: 2348 - RNA, 19 nt, synthetic construct
  misc_feature 1..19: note = Targeting domain
  source 1..19: mol_type = other RNA
gagcaaaacaactggaaga

SEQ ID NO: 2349 - RNA, 23 nt, synthetic construct
  misc_feature 1..23: note = Targeting domain
  source 1..23: mol_type = other RNA
gtgtgaagaatggaatagataat

SEQ ID NO: 2350 - RNA, 21 nt, synthetic construct
  misc_feature 1..21: note = Targeting domain
  source 1..21: mol_type = other RNA
gtgaagaatggaatagataat

SEQ ID NO: 2351 - RNA, 19 nt, synthetic construct
  misc_feature 1..19: note = Targeting domain
  source 1..19: mol_type = other RNA
gaagaatggaatagataat

SEQ ID NO: 2352 - RNA, 24 nt, synthetic construct
  misc_feature 1..24: note = Targeting domain
  source 1..24: mol_type = other RNA
gtaaggaggatgtaagactggaga

SEQ ID NO: 2353 - skipped

SEQ ID NO: 2354 - RNA, 19 nt, synthetic construct
  misc_feature 1..19: note = Targeting domain
  source 1..19: mol_type = other RNA
gaggatgtaagactggaga

SEQ ID NO: 2355 - RNA, 24 nt, synthetic construct
  misc_feature 1..24: note = Targeting domain
  source 1..24: mol_type = other RNA
gaaaaacttgaaatttgatagtag

SEQ ID NO: 2356 - RNA, 24 nt, synthetic construct
  misc_feature 1..24: note = Targeting domain
  source 1..24: mol_type = other RNA
gtgtttacatatctgtcttcctta

SEQ ID NO: 2357 - RNA, 22 nt, synthetic construct
  misc_feature 1..22: note = Targeting domain
  source 1..22: mol_type = other RNA
gtttacatatctgtcttcctta

SEQ ID NO: 2358 - RNA, 23 nt, synthetic construct
  misc_feature 1..23: note = Targeting domain
  source 1..23: mol_type = other RNA
gttccattaaaaaaagtatgctt

SEQ ID NO: 2359 - RNA, 21 nt, synthetic construct
  misc_feature 1..21: note = Targeting domain
  source 1..21: mol_type = other RNA
ggaatataagtcttttgatat

SEQ ID NO: 2360 - skipped

SEQ ID NO: 2361 - RNA, 24 nt, synthetic construct
  misc_feature 1..24: note = Targeting domain
  source 1..24: mol_type = other RNA
gtgtgaagaatggaatagataata

SEQ ID NO: 2362 - RNA, 22 nt, synthetic construct
  misc_feature 1..22: note = Targeting domain
  source 1..22: mol_type = other RNA
gtgaagaatggaatagataata

SEQ ID NO: 2363 - RNA, 18 nt, synthetic construct
  misc_feature 1..18: note = Targeting domain
  source 1..18: mol_type = other RNA
ggatgggtaataaagcaa

SEQ ID NO: 2364 - RNA, 21 nt, synthetic construct
  misc_feature 1..21: note = Targeting domain
  source 1..21: mol_type = other RNA
gaaattcactgagcaaaacaa

SEQ ID NO: 2365 - RNA, 23 nt, synthetic construct
  misc_feature 1..23: note = CEP290-1557 targeting domain (RNA)
  source 1..23: mol_type = other RNA
ggatgtaagactggagatagaga

SEQ ID NO: 2366 - RNA, 22 nt, synthetic construct
  misc_feature 1..22: note = CEP290-1558 targeting domain (RNA)
  source 1..22: mol_type = other RNA
gatgtaagactggagatagaga

SEQ ID NO: 2367 - RNA, 19 nt, synthetic construct
  misc_feature 1..19: note = CEP290-1559 targeting domain (RNA)
  source 1..19: mol_type = other RNA
gtaagactggagatagaga

SEQ ID NO: 2368 - RNA, 22 nt, synthetic construct
  misc_feature 1..22: note = CEP290-1560 targeting domain
  source 1..22: mol_type = other RNA
gaaatttgatagtagaagaaaa

SEQ ID NO: 2369 - RNA, 23 nt, synthetic construct
  misc_feature 1..23: note = CEP290-1561 targeting domain
  source 1..23: mol_type = other RNA
gggtaataaagcaaaagaaaaac

SEQ ID NO: 2370 - RNA, 22 nt, synthetic construct
  misc_feature 1..22: note = CEP290-1562 targeting domain (RNA)
  source 1..22: mol_type = other RNA
ggtaataaagcaaaagaaaaac

SEQ ID NO: 2371 - RNA, 21 nt, synthetic construct
  misc_feature 1..21: note = Targeting domain
  source 1..21: mol_type = other RNA
gtaataaagcaaaagaaaaac

SEQ ID NO: 2372 - RNA, 22 nt, synthetic construct
  misc_feature 1..22: note = Targeting domain
  source 1..22: mol_type = other RNA
gcactccagcctgggcaacaca

SEQ ID NO: 2373 - RNA, 24 nt, synthetic construct
  misc_feature 1..24: note = CEP290-1565 targeting domain
  source 1..24: mol_type = other RNA
tacttacctcatgtcatctagagc

SEQ ID NO: 2374 - RNA, 21 nt, synthetic construct
  misc_feature 1..21: note = Targeting domain
  source 1..21: mol_type = other RNA
ttacctcatgtcatctagagc

SEQ ID NO: 2375-2376 - skipped (2 entries)

SEQ ID NO: 2377 - RNA, 19 nt, synthetic construct
  misc_feature 1..19: note = Targeting domain
  source 1..19: mol_type = other RNA
ttttaaggcggggagtcac

SEQ ID NO: 2378 - RNA, 18 nt, synthetic construct
  misc_feature 1..18: note = Targeting domain
  source 1..18: mol_type = other RNA
tttaaggcggggagtcac

SEQ ID NO: 2379 - RNA, 24 nt, synthetic construct
  misc_feature 1..24: note = Targeting domain
  source 1..24: mol_type = other RNA
ttggcacagagttcaagctaatac

SEQ ID NO: 2380 - RNA, 23 nt, synthetic construct
  misc_feature 1..23: note = Targeting domain
  source 1..23: mol_type = other RNA
tggcacagagttcaagctaatac

SEQ ID NO: 2381 - RNA, 23 nt, synthetic construct
  misc_feature 1..23: note = Targeting domain
  source 1..23: mol_type = other RNA
ttagcttgaactctgtgccaaac

SEQ ID NO: 2382 - RNA, 22 nt, synthetic construct
  misc_feature 1..22: note = Targeting domain
  source 1..22: mol_type = other RNA
tagcttgaactctgtgccaaac

SEQ ID NO: 2383 - RNA, 18 nt, synthetic construct
  misc_feature 1..18: note = Targeting domain
  source 1..18: mol_type = other RNA
ttgaactctgtgccaaac

SEQ ID NO: 2384 - RNA, 21 nt, synthetic construct
  misc_feature 1..21: note = CEP290-1576 targeting domain
  source 1..21: mol_type = other RNA
tgtggtgtcaaatatggtgct

SEQ ID NO: 2385 - RNA, 19 nt, synthetic construct
  misc_feature 1..19: note = Targeting domain
  source 1..19: mol_type = other RNA
tggtgtcaaatatggtgct

SEQ ID NO: 2386 - RNA, 22 nt, synthetic construct
  misc_feature 1..22: note = Targeting domain
  source 1..22: mol_type = other RNA
tgtggtgtcaaatatggtgctt

SEQ ID NO: 2387 - skipped

SEQ ID NO: 2388 - RNA, 24 nt, synthetic construct
  misc_feature 1..24: note = Targeting domain
  source 1..24: mol_type = other RNA
tgctctagatgacatgaggtaagt

SEQ ID NO: 2389 - RNA, 21 nt, synthetic construct
  misc_feature 1..21: note = Targeting domain
  source 1..21: mol_type = other RNA
tctagatgacatgaggtaagt

SEQ ID NO: 2390 - RNA, 19 nt, synthetic construct
  misc_feature 1..19: note = Targeting domain
  source 1..19: mol_type = other RNA
tagatgacatgaggtaagt

SEQ ID NO: 2391 - RNA, 23 nt, synthetic construct
  misc_feature 1..23: note = Targeting domain
  source 1..23: mol_type = other RNA
taatacatgagagtgattagtgg

SEQ ID NO: 2392 - RNA, 24 nt, synthetic construct
  misc_feature 1..24: note = Targeting domain
  source 1..24: mol_type = other RNA
taaaggttcatgagactagaggtc

SEQ ID NO: 2393 - RNA, 18 nt, synthetic construct
  misc_feature 1..18: note = Targeting domain
  source 1..18: mol_type = other RNA
ttcatgagactagaggtc

SEQ ID NO: 2394 - RNA, 23 nt, synthetic construct
  misc_feature 1..23: note = Targeting domain
  source 1..23: mol_type = other RNA
tggcagtaaggaggatgtaagac

SEQ ID NO: 2395 - RNA, 22 nt, synthetic construct
  misc_feature 1..22: note = Targeting domain
  source 1..22: mol_type = other RNA
tagcttttgacagtttttaagg

SEQ ID NO: 2396 - RNA, 18 nt, synthetic construct
  misc_feature 1..18: note = Targeting domain
  source 1..18: mol_type = other RNA
ttttgacagtttttaagg

SEQ ID NO: 2397 - RNA, 24 nt, synthetic construct
  misc_feature 1..24: note = Targeting domain
  source 1..24: mol_type = other RNA
ttgtacgtgctcttttctatatat

SEQ ID NO: 2398 - RNA, 23 nt, synthetic construct
  misc_feature 1..23: note = Targeting domain
  source 1..23: mol_type = other RNA
tgtacgtgctcttttctatatat

SEQ ID NO: 2399 - RNA, 21 nt, synthetic construct
  misc_feature 1..21: note = CEP290-1592 targeting domain
  source 1..21: mol_type = other RNA
tacgtgctcttttctatatat

SEQ ID NO: 2400 - RNA, 21 nt, synthetic construct
  misc_feature 1..21: note = Targeting domain
  source 1..21: mol_type = other RNA
ttcactgagcaaaacaactgg

SEQ ID NO: 2401 - skipped

SEQ ID NO: 2402 - RNA, 22 nt, synthetic construct
  misc_feature 1..22: note = Targeting domain
  source 1..22: mol_type = other RNA
tgaacaagttttgaaacaggaa

SEQ ID NO: 2403 - RNA, 23 nt, synthetic construct
  misc_feature 1..23: note = Targeting domain
  source 1..23: mol_type = other RNA
taatgcctgaacaagttttgaaa

SEQ ID NO: 2404 - skipped

SEQ ID NO: 2405 - RNA, 23 nt, synthetic construct
  misc_feature 1..23: note = Targeting domain
  source 1..23: mol_type = other RNA
ttcactgagcaaaacaactggaa

SEQ ID NO: 2406 - RNA, 22 nt, synthetic construct
  misc_feature 1..22: note = Targeting domain
  source 1..22: mol_type = other RNA
tcactgagcaaaacaactggaa

SEQ ID NO: 2407 - RNA, 18 nt, synthetic construct
  misc_feature 1..18: note = Targeting domain
  source 1..18: mol_type = other RNA
tgagcaaaacaactggaa

SEQ ID NO: 2408 - RNA, 24 nt, synthetic construct
  misc_feature 1..24: note = CEP290-1601 targeting domain
  source 1..24: mol_type = other RNA
tttgtacgtgctcttttctatata

SEQ ID NO: 2409 - RNA, 23 nt, synthetic construct
  misc_feature 1..23: note = Targeting domain
  source 1..23: mol_type = other RNA
ttgtacgtgctcttttctatata

SEQ ID NO: 2410 - RNA, 22 nt, synthetic construct
  misc_feature 1..22: note = Targeting domain
  source 1..22: mol_type = other RNA
tgtacgtgctcttttctatata

SEQ ID NO: 2411 - skipped

SEQ ID NO: 2412 - RNA, 24 nt, synthetic construct
  misc_feature 1..24: note = Targeting domain
  source 1..24: mol_type = other RNA
tattatctattccattcttcacac

SEQ ID NO: 2413 - RNA, 22 nt, synthetic construct
  misc_feature 1..22: note = Targeting domain
  source 1..22: mol_type = other RNA
ttatctattccattcttcacac

SEQ ID NO: 2414 - RNA, 21 nt, synthetic construct
  misc_feature 1..21: note = Targeting domain
  source 1..21: mol_type = other RNA
tatctattccattcttcacac

SEQ ID NO: 2415 - RNA, 19 nt, synthetic construct
  misc_feature 1..19: note = Targeting domain
  source 1..19: mol_type = other RNA
tctattccattcttcacac

SEQ ID NO: 2416 - RNA, 24 nt, synthetic construct
  misc_feature 1..24: note = Targeting domain
  source 1..24: mol_type = other RNA
tgcttaggaaattattgttgcttt

SEQ ID NO: 2417 - RNA, 21 nt, synthetic construct
  misc_feature 1..21: note = Targeting domain
  source 1..21: mol_type = other RNA
ttaggaaattattgttgcttt

SEQ ID NO: 2418 - RNA, 20 nt, synthetic construct
  misc_feature 1..20: note = Targeting domain
  source 1..20: mol_type = other RNA
taggaaattattgttgcttt

SEQ ID NO: 2419 - RNA, 24 nt, synthetic construct
  misc_feature 1..24: note = Targeting domain
  source 1..24: mol_type = other RNA
ttgctttttgagaggtaaaggttc

SEQ ID NO: 2420 - RNA, 23 nt, synthetic construct
  misc_feature 1..23: note = Targeting domain
  source 1..23: mol_type = other RNA
tgctttttgagaggtaaaggttc

SEQ ID NO: 2421 - RNA, 20 nt, synthetic construct
  misc_feature 1..20: note = Targeting domain
  source 1..20: mol_type = other RNA
tttttgagaggtaaaggttc

SEQ ID NO: 2422 - RNA, 19 nt, synthetic construct
  misc_feature 1..19: note = Targeting domain
  source 1..19: mol_type = other RNA
ttttgagaggtaaaggttc

SEQ ID NO: 2423 - RNA, 18 nt, synthetic construct
  misc_feature 1..18: note = Targeting domain
  source 1..18: mol_type = other RNA
tttgagaggtaaaggttc

SEQ ID NO: 2424 - RNA, 24 nt, synthetic construct
  misc_feature 1..24: note = Targeting domain
  source 1..24: mol_type = other RNA
tcactgagcaaaacaactggaaga

SEQ ID NO: 2425 - skipped

SEQ ID NO: 2426 - RNA, 23 nt, synthetic construct
  misc_feature 1..23: note = Targeting domain
  source 1..23: mol_type = other RNA
tacataagaaagaacactgtggt

SEQ ID NO: 2427 - RNA, 19 nt, synthetic construct
  misc_feature 1..19: note = Targeting domain
  source 1..19: mol_type = other RNA
taagaaagaacactgtggt

SEQ ID NO: 2428 - RNA, 24 nt, synthetic construct
  misc_feature 1..24: note = Targeting domain
  source 1..24: mol_type = other RNA
tgtgtgaagaatggaatagataat

SEQ ID NO: 2429 - RNA, 22 nt, synthetic construct
  misc_feature 1..22: note = Targeting domain
  source 1..22: mol_type = other RNA
tgtgaagaatggaatagataat

SEQ ID NO: 2430 - RNA, 20 nt, synthetic construct
  misc_feature 1..20: note = Targeting domain
  source 1..20: mol_type = other RNA
tgaagaatggaatagataat

SEQ ID NO: 2431 - RNA, 23 nt, synthetic construct
  misc_feature 1..23: note = Targeting domain
  source 1..23: mol_type = other RNA
taaggaggatgtaagactggaga

SEQ ID NO: 2432 - RNA, 23 nt, synthetic construct
  misc_feature 1..23: note = Targeting domain
  source 1..23: mol_type = other RNA
tgtttacatatctgtcttcctta

SEQ ID NO: 2433 - RNA, 21 nt, synthetic construct
  misc_feature 1..21: note = Targeting domain
  source 1..21: mol_type = other RNA
tttacatatctgtcttcctta

SEQ ID NO: 2434 - skipped

SEQ ID NO: 2435 - RNA, 19 nt, synthetic construct
  misc_feature 1..19: note = Targeting domain
  source 1..19: mol_type = other RNA
tacatatctgtcttcctta

SEQ ID NO: 2436 - RNA, 24 nt, synthetic construct
  misc_feature 1..24: note = Targeting domain
  source 1..24: mol_type = other RNA
tgttccattaaaaaaagtatgctt

SEQ ID NO: 2437 - RNA, 22 nt, synthetic construct
  misc_feature 1..22: note = Targeting domain
  source 1..22: mol_type = other RNA
ttccattaaaaaaagtatgctt

SEQ ID NO: 2438 - RNA, 21 nt, synthetic construct
  misc_feature 1..21: note = Targeting domain
  source 1..21: mol_type = other RNA
tccattaaaaaaagtatgctt

SEQ ID NO: 2439 - RNA, 23 nt, synthetic construct
  misc_feature 1..23: note = CEP290-1632 targeting domain (RNA)
  source 1..23: mol_type = other RNA
tatcaaaagacttatattccatt

SEQ ID NO: 2440 - RNA, 21 nt, synthetic construct
  misc_feature 1..21: note = Targeting domain
  source 1..21: mol_type = other RNA
tcaaaagacttatattccatt

SEQ ID NO: 2441 - RNA, 20 nt, synthetic construct
  misc_feature 1..20: note = Targeting domain
  source 1..20: mol_type = other RNA
tcagatttcatgtgtgaaga

SEQ ID NO: 2442 - RNA, 22 nt, synthetic construct
  misc_feature 1..22: note = Targeting domain
  source 1..22: mol_type = other RNA
tggaatataagtcttttgatat

SEQ ID NO: 2443 - RNA, 23 nt, synthetic construct
  misc_feature 1..23: note = Targeting domain
  source 1..23: mol_type = other RNA
tgtgaagaatggaatagataata

SEQ ID NO: 2444 - RNA, 21 nt, synthetic construct
  misc_feature 1..21: note = Targeting domain
  source 1..21: mol_type = other RNA
tgaagaatggaatagataata

SEQ ID NO: 2445 - RNA, 19 nt, synthetic construct
  misc_feature 1..19: note = Targeting domain
  source 1..19: mol_type = other RNA
tggatgggtaataaagcaa

SEQ ID NO: 2446 - RNA, 23 nt, synthetic construct
  misc_feature 1..23: note = CEP290-1639 targeting domain (RNA)
  source 1..23: mol_type = other RNA
tagaaattcactgagcaaaacaa

SEQ ID NO: 2447 - skipped

SEQ ID NO: 2448 - RNA, 18 nt, synthetic construct
  misc_feature 1..18: note = CEP290-1641 targeting domain (RNA)
  source 1..18: mol_type = other RNA
taagactggagatagaga

SEQ ID NO: 2449 - RNA, 24 nt, synthetic construct
  misc_feature 1..24: note = Targeting domain
  source 1..24: mol_type = other RNA
ttgaaatttgatagtagaagaaaa

SEQ ID NO: 2450 - RNA, 23 nt, synthetic construct
  misc_feature 1..23: note = Targeting domain
  source 1..23: mol_type = other RNA
tgaaatttgatagtagaagaaaa

SEQ ID NO: 2451 - RNA, 18 nt, synthetic construct
  misc_feature 1..18: note = Targeting domain
  source 1..18: mol_type = other RNA
tttgatagtagaagaaaa

SEQ ID NO: 2452 - skipped

SEQ ID NO: 2453 - RNA, 24 nt, synthetic construct
  misc_feature 1..24: note = CEP290-1646 targeting domain (RNA)
  source 1..24: mol_type = other RNA
tttttcttaagcatacttttttta

SEQ ID NO: 2454 - RNA, 23 nt, synthetic construct
  misc_feature 1..23: note = Targeting domain
  source 1..23: mol_type = other RNA
ttttcttaagcatacttttttta

SEQ ID NO: 2455 - RNA, 22 nt, synthetic construct
  misc_feature 1..22: note = Targeting domain
  source 1..22: mol_type = other RNA
tttcttaagcatacttttttta

SEQ ID NO: 2456 - RNA, 21 nt, synthetic construct
  misc_feature 1..21: note = Targeting domain
  source 1..21: mol_type = other RNA
ttcttaagcatacttttttta

SEQ ID NO: 2457 - skipped

SEQ ID NO: 2458 - RNA, 18 nt, synthetic construct
  misc_feature 1..18: note = Targeting domain
  source 1..18: mol_type = other RNA
ttaagcatacttttttta

SEQ ID NO: 2459 - RNA, 24 nt, synthetic construct
  misc_feature 1..24: note = Targeting domain
  source 1..24: mol_type = other RNA
tgggtaataaagcaaaagaaaaac

SEQ ID NO: 2460 - RNA, 20 nt, synthetic construct
  misc_feature 1..20: note = CEP290-1653 targeting domain (RNA)
  source 1..20: mol_type = other RNA
taataaagcaaaagaaaaac

SEQ ID NO: 2461 - RNA, 23 nt, synthetic construct
  misc_feature 1..23: note = Targeting domain
  source 1..23: mol_type = other RNA
ttctttttttgttgttttttttt

SEQ ID NO: 2462 - RNA, 22 nt, synthetic construct
  misc_feature 1..22: note = Targeting domain
  source 1..22: mol_type = other RNA
tctttttttgttgttttttttt

SEQ ID NO: 2463 - RNA, 20 nt, synthetic construct
  misc_feature 1..20: note = Targeting domain
  source 1..20: mol_type = other RNA
tttttttgttgttttttttt

SEQ ID NO: 2464 - RNA, 19 nt, synthetic construct
  misc_feature 1..19: note = Targeting domain
  source 1..19: mol_type = other RNA
ttttttgttgttttttttt

SEQ ID NO: 2465 - RNA, 18 nt, synthetic construct
  misc_feature 1..18: note = CEP290-1658 targeting domain (RNA)
  source 1..18: mol_type = other RNA
tttttgttgttttttttt

SEQ ID NO: 2466 - RNA, 23 nt, synthetic construct
  misc_feature 1..23: note = Targeting domain
  source 1..23: mol_type = other RNA
tgcactccagcctgggcaacaca

SEQ ID NO: 2467 - RNA, 18 nt, synthetic construct
  misc_feature 1..18: note = Targeting domain
  source 1..18: mol_type = other RNA
tccagcctgggcaacaca

SEQ ID NO: 2468 - RNA, 21 nt, synthetic construct
  misc_feature 1..21: note = CEP290-1661 targeting domain (RNA)
  source 1..21: mol_type = other RNA
attttcgtgacctctagtctc

SEQ ID NO: 2469 - RNA, 23 nt, synthetic construct
  misc_feature 1..23: note = CEP290-1662 targeting domain (RNA)
  source 1..23: mol_type = other RNA
actaatcactctcatgtattagc

SEQ ID NO: 2470 - skipped

SEQ ID NO: 2471 - RNA, 19 nt, synthetic construct
  misc_feature 1..19: note = Targeting domain
  source 1..19: mol_type = other RNA
atcactctcatgtattagc

SEQ ID NO: 2472 - RNA, 19 nt, synthetic construct
  misc_feature 1..19: note = Targeting domain
  source 1..19: mol_type = other RNA
agatgacatgaggtaagta

SEQ ID NO: 2473 - RNA, 24 nt, synthetic construct
  misc_feature 1..24: note = Targeting domain
  source 1..24: mol_type = other RNA
acctcatgtcatctagagcaagag

SEQ ID NO: 2474 - RNA, 19 nt, synthetic construct
  misc_feature 1..19: note = Targeting domain
  source 1..19: mol_type = other RNA
atgtcatctagagcaagag

SEQ ID NO: 2475 - RNA, 24 nt, synthetic construct
  misc_feature 1..24: note = CEP290-1668 targeting domain (RNA)
  source 1..24: mol_type = other RNA
aatacatgagagtgattagtggtg

SEQ ID NO: 2476 - RNA, 23 nt, synthetic construct
  misc_feature 1..23: note = CEP290-1669 targeting domain (RNA)
  source 1..23: mol_type = other RNA
atacatgagagtgattagtggtg

SEQ ID NO: 2477 - RNA, 21 nt, synthetic construct
  misc_feature 1..21: note = Targeting domain
  source 1..21: mol_type = other RNA
acatgagagtgattagtggtg

SEQ ID NO: 2478 - RNA, 19 nt, synthetic construct
  misc_feature 1..19: note = Targeting domain
  source 1..19: mol_type = other RNA
atgagagtgattagtggtg

SEQ ID NO: 2479 - RNA, 21 nt, synthetic construct
  misc_feature 1..21: note = Targeting domain
  source 1..21: mol_type = other RNA
acgtgctcttttctatatata

SEQ ID NO: 2480 - RNA, 21 nt, synthetic construct
  misc_feature 1..21: note = Targeting domain
  source 1..21: mol_type = other RNA
acaaaacctatgtataagatg

SEQ ID NO: 2481 - RNA, 19 nt, synthetic construct
  misc_feature 1..19: note = Targeting domain
  source 1..19: mol_type = other RNA
aaaacctatgtataagatg

SEQ ID NO: 2482 - RNA, 18 nt, synthetic construct
  misc_feature 1..18: note = Targeting domain
  source 1..18: mol_type = other RNA
aaacctatgtataagatg

SEQ ID NO: 2483 - RNA, 24 nt, synthetic construct
  misc_feature 1..24: note = Targeting domain
  source 1..24: mol_type = other RNA
atatatagaaaagagcacgtacaa

SEQ ID NO: 2484 - RNA, 22 nt, synthetic construct
  misc_feature 1..22: note = CEP290-1677 targeting domain (RNA)
  source 1..22: mol_type = other RNA
atatagaaaagagcacgtacaa

SEQ ID NO: 2485 - skipped

SEQ ID NO: 2486 - RNA, 18 nt, synthetic construct
  misc_feature 1..18: note = Targeting domain
  source 1..18: mol_type = other RNA
agaaaagagcacgtacaa

SEQ ID NO: 2487 - RNA, 24 nt, synthetic construct
  misc_feature 1..24: note = Targeting domain
  source 1..24: mol_type = other RNA
agaaatggttccctatatatagaa

SEQ ID NO: 2488 - RNA, 22 nt, synthetic construct
  misc_feature 1..22: note = Targeting domain
  source 1..22: mol_type = other RNA
aaatggttccctatatatagaa

SEQ ID NO: 2489 - RNA, 21 nt, synthetic construct
  misc_feature 1..21: note = Targeting domain
  source 1..21: mol_type = other RNA
aatggttccctatatatagaa

SEQ ID NO: 2490 - skipped

SEQ ID NO: 2491 - RNA, 24 nt, synthetic construct
  misc_feature 1..24: note = CEP290-1684 targeting domain (RNA)
  source 1..24: mol_type = other RNA
atggaatataagtcttttgatata

SEQ ID NO: 2492 - skipped

SEQ ID NO: 2493 - RNA, 19 nt, synthetic construct
  misc_feature 1..19: note = CEP290-1686 targeting domain (RNA)
  source 1..19: mol_type = other RNA
atataagtcttttgatata

SEQ ID NO: 2494 - RNA, 24 nt, synthetic construct
  misc_feature 1..24: note = CEP290-1687 targeting domain (RNA)
  source 1..24: mol_type = other RNA
acgtacaaaagaacatacataaga

SEQ ID NO: 2495 - skipped

SEQ ID NO: 2496 - RNA, 18 nt, synthetic construct
  misc_feature 1..18: note = CEP290-1689 targeting domain (RNA)
  source 1..18: mol_type = other RNA
aaaagaacatacataaga

SEQ ID NO: 2497 - RNA, 19 nt, synthetic construct
  misc_feature 1..19: note = Targeting domain
  source 1..19: mol_type = other RNA
aagaaaaaaaaggtaatgc

SEQ ID NO: 2498 - RNA, 18 nt, synthetic construct
  misc_feature 1..18: note = Targeting domain
  source 1..18: mol_type = other RNA
agaaaaaaaaggtaatgc

SEQ ID NO: 2499 - RNA, 19 nt, synthetic construct
  misc_feature 1..19: note = Targeting domain
  source 1..19: mol_type = other RNA
aaacaggaatagaaattca

SEQ ID NO: 2500 - RNA, 18 nt, synthetic construct
  misc_feature 1..18: note = CEP290-1693 targeting domain (RNA)
  source 1..18: mol_type = other RNA
aacaggaatagaaattca

SEQ ID NO: 2501 - RNA, 24 nt, synthetic construct
  misc_feature 1..24: note = Targeting domain
  source 1..24: mol_type = other RNA
aagatcactccactgcactccagc

SEQ ID NO: 2502 - RNA, 23 nt, synthetic construct
  misc_feature 1..23: note = Targeting domain
  source 1..23: mol_type = other RNA
agatcactccactgcactccagc

SEQ ID NO: 2503 - RNA, 21 nt, synthetic construct
  misc_feature 1..21: note = Targeting domain
  source 1..21: mol_type = other RNA
atcactccactgcactccagc

SEQ ID NO: 2504 - RNA, 18 nt, synthetic construct
  misc_feature 1..18: note = Targeting domain
  source 1..18: mol_type = other RNA
actccactgcactccagc

SEQ ID NO: 2505 - RNA, 22 nt, synthetic construct
  misc_feature 1..22: note = CEP290-1698 targeting domain (RNA)
  source 1..22: mol_type = other RNA
cccctacttacctcatgtcatc

SEQ ID NO: 2506 - RNA, 21 nt, synthetic construct
  misc_feature 1..21: note = Targeting domain
  source 1..21: mol_type = other RNA
ccctacttacctcatgtcatc

SEQ ID NO: 2507 - skipped

SEQ ID NO: 2508 - RNA, 19 nt, synthetic construct
  misc_feature 1..19: note = CEP290-1701 targeting domain (RNA)
  source 1..19: mol_type = other RNA
ctacttacctcatgtcatc

SEQ ID NO: 2509 - RNA, 24 nt, synthetic construct
  misc_feature 1..24: note = CEP290-1702 targeting domain (RNA)
  source 1..24: mol_type = other RNA
ctgattttcgtgacctctagtctc

SEQ ID NO: 2510 - RNA, 24 nt, synthetic construct
  misc_feature 1..24: note = CEP290-1703 targeting domain (RNA)
  source 1..24: mol_type = other RNA
cactaatcactctcatgtattagc

SEQ ID NO: 2511 - RNA, 22 nt, synthetic construct
  misc_feature 1..22: note = CEP290-1704 targeting domain (RNA)
  source 1..22: mol_type = other RNA
ctaatcactctcatgtattagc

SEQ ID NO: 2512 - RNA, 23 nt, synthetic construct
  misc_feature 1..23: note = Targeting domain
  source 1..23: mol_type = other RNA
ctctagatgacatgaggtaagta

SEQ ID NO: 2513 - RNA, 21 nt, synthetic construct
  misc_feature 1..21: note = CEP290-1706 targeting domain (RNA)
  source 1..21: mol_type = other RNA
ctagatgacatgaggtaagta

SEQ ID NO: 2514 - RNA, 23 nt, synthetic construct
  misc_feature 1..23: note = Targeting domain
  source 1..23: mol_type = other RNA
cctcatgtcatctagagcaagag

SEQ ID NO: 2515 - RNA, 22 nt, synthetic construct
  misc_feature 1..22: note = Targeting domain
  source 1..22: mol_type = other RNA
ctcatgtcatctagagcaagag

SEQ ID NO: 2516-2519 - skipped (4 entries)

SEQ ID NO: 2520 - RNA, 23 nt, synthetic construct
  misc_feature 1..23: note = Targeting domain
  source 1..23: mol_type = other RNA
cgtacaaaagaacatacataaga

SEQ ID NO: 2521 - RNA, 19 nt, synthetic construct
  misc_feature 1..19: note = Targeting domain
  source 1..19: mol_type = other RNA
caaaagaacatacataaga

SEQ ID NO: 2522 - RNA, 22 nt, synthetic construct
  misc_feature 1..22: note = Targeting domain
  source 1..22: mol_type = other RNA
cttaagaaaaaaaaggtaatgc

SEQ ID NO: 2523 - skipped

SEQ ID NO: 2524 - RNA, 19 nt, synthetic construct
  misc_feature 1..19: note = Targeting domain
  source 1..19: mol_type = other RNA
cactccactgcactccagc

SEQ ID NO: 2525 - RNA, 24 nt, synthetic construct
  misc_feature 1..24: note = CEP290-132 targeting domain (RNA)
  source 1..24: mol_type = other RNA
gtcccctacttacctcatgtcatc

SEQ ID NO: 2526 - RNA, 22 nt, synthetic construct
  misc_feature 1..22: note = Targeting domain
  source 1..22: mol_type = other RNA
gattttcgtgacctctagtctc

SEQ ID NO: 2527 - RNA, 24 nt, synthetic construct
  misc_feature 1..24: note = Targeting domain
  source 1..24: mol_type = other RNA
gctctagatgacatgaggtaagta

SEQ ID NO: 2528 - RNA, 18 nt, synthetic construct
  misc_feature 1..18: note = Targeting domain
  source 1..18: mol_type = other RNA
gatgacatgaggtaagta

SEQ ID NO: 2529 - RNA, 23 nt, synthetic construct
  misc_feature 1..23: note = Targeting domain
  source 1..23: mol_type = other RNA
gtacgtgctcttttctatatata

SEQ ID NO: 2530 - RNA, 19 nt, synthetic construct
  misc_feature 1..19: note = Targeting domain
  source 1..19: mol_type = other RNA
gtgctcttttctatatata

SEQ ID NO: 2531 - RNA, 23 nt, synthetic construct
  misc_feature 1..23: note = CEP290-1723 targeting domain (RNA)
  source 1..23: mol_type = other RNA
gtacaaaacctatgtataagatg

SEQ ID NO: 2532 - RNA, 23 nt, synthetic construct
  misc_feature 1..23: note = Targeting domain
  source 1..23: mol_type = other RNA
gaaatggttccctatatatagaa

SEQ ID NO: 2533 - RNA, 18 nt, synthetic construct
  misc_feature 1..18: note = Targeting domain
  source 1..18: mol_type = other RNA
ggttccctatatatagaa

SEQ ID NO: 2534 - RNA, 22 nt, synthetic construct
  misc_feature 1..22: note = Targeting domain
  source 1..22: mol_type = other RNA
ggaatataagtcttttgatata

SEQ ID NO: 2535 - RNA, 21 nt, synthetic construct
  misc_feature 1..21: note = Targeting domain
  source 1..21: mol_type = other RNA
gaatataagtcttttgatata

SEQ ID NO: 2536 - RNA, 22 nt, synthetic construct
  misc_feature 1..22: note = Targeting domain
  source 1..22: mol_type = other RNA
gtacaaaagaacatacataaga

SEQ ID NO: 2537 - RNA, 23 nt, synthetic construct
  misc_feature 1..23: note = Targeting domain
  source 1..23: mol_type = other RNA
gcttaagaaaaaaaaggtaatgc

SEQ ID NO: 2538 - skipped

SEQ ID NO: 2539 - RNA, 22 nt, synthetic construct
  misc_feature 1..22: note = Targeting domain
  source 1..22: mol_type = other RNA
gatcactccactgcactccagc

SEQ ID NO: 2540 - RNA, 23 nt, synthetic construct
  misc_feature 1..23: note = Targeting domain
  source 1..23: mol_type = other RNA
tcccctacttacctcatgtcatc

SEQ ID NO: 2541 - RNA, 18 nt, synthetic construct
  misc_feature 1..18: note = CEP290-1733 targeting domain (RNA)
  source 1..18: mol_type = other RNA
tacttacctcatgtcatc

SEQ ID NO: 2542 - RNA, 23 nt, synthetic construct
  misc_feature 1..23: note = Targeting domain
  source 1..23: mol_type = other RNA
tgattttcgtgacctctagtctc

SEQ ID NO: 2543 - RNA, 20 nt, synthetic construct
  misc_feature 1..20: note = Targeting domain
  source 1..20: mol_type = other RNA
ttttcgtgacctctagtctc

SEQ ID NO: 2544 - RNA, 19 nt, synthetic construct
  misc_feature 1..19: note = Targeting domain
  source 1..19: mol_type = other RNA
tttcgtgacctctagtctc

SEQ ID NO: 2545 - RNA, 18 nt, synthetic construct
  misc_feature 1..18: note = Targeting domain
  source 1..18: mol_type = other RNA
ttcgtgacctctagtctc

SEQ ID NO: 2546 - RNA, 21 nt, synthetic construct
  misc_feature 1..21: note = Targeting domain
  source 1..21: mol_type = other RNA
taatcactctcatgtattagc

SEQ ID NO: 2547 - RNA, 18 nt, synthetic construct
  misc_feature 1..18: note = CEP290-1739 targeting domain (RNA)
  source 1..18: mol_type = other RNA
tcactctcatgtattagc

SEQ ID NO: 2548 - RNA, 22 nt, synthetic construct
  misc_feature 1..22: note = Targeting domain
  source 1..22: mol_type = other RNA
tctagatgacatgaggtaagta

SEQ ID NO: 2549 - skipped

SEQ ID NO: 2550 - RNA, 21 nt, synthetic construct
  misc_feature 1..21: note = Targeting domain
  source 1..21: mol_type = other RNA
tcatgtcatctagagcaagag

SEQ ID NO: 2551 - RNA, 18 nt, synthetic construct
  misc_feature 1..18: note = Targeting domain
  source 1..18: mol_type = other RNA
tgtcatctagagcaagag

SEQ ID NO: 2552 - RNA, 22 nt, synthetic construct
  misc_feature 1..22: note = Targeting domain
  source 1..22: mol_type = other RNA
tacatgagagtgattagtggtg

SEQ ID NO: 2553 - RNA, 18 nt, synthetic construct
  misc_feature 1..18: note = Targeting domain
  source 1..18: mol_type = other RNA
tgagagtgattagtggtg

SEQ ID NO: 2554 - RNA, 24 nt, synthetic construct
  misc_feature 1..24: note = Targeting domain
  source 1..24: mol_type = other RNA
tgtacgtgctcttttctatatata

SEQ ID NO: 2555 - RNA, 22 nt, synthetic construct
  misc_feature 1..22: note = Targeting domain
  source 1..22: mol_type = other RNA
tacgtgctcttttctatatata

SEQ ID NO: 2556 - RNA, 18 nt, synthetic construct
  misc_feature 1..18: note = Targeting domain
  source 1..18: mol_type = other RNA
tgctcttttctatatata

SEQ ID NO: 2557 - RNA, 24 nt, synthetic construct
  misc_feature 1..24: note = Targeting domain
  source 1..24: mol_type = other RNA
tgtacaaaacctatgtataagatg

SEQ ID NO: 2558 - RNA, 22 nt, synthetic construct
  misc_feature 1..22: note = CEP290-1750 targeting domain (RNA)
  source 1..22: mol_type = other RNA
tacaaaacctatgtataagatg

SEQ ID NO: 2559 - RNA, 23 nt, synthetic construct
  misc_feature 1..23: note = Targeting domain
  source 1..23: mol_type = other RNA
tatatagaaaagagcacgtacaa

SEQ ID NO: 2560 - RNA, 21 nt, synthetic construct
  misc_feature 1..21: note = Targeting domain
  source 1..21: mol_type = other RNA
tatagaaaagagcacgtacaa

SEQ ID NO: 2561 - RNA, 19 nt, synthetic construct
  misc_feature 1..19: note = Targeting domain
  source 1..19: mol_type = other RNA
tagaaaagagcacgtacaa

SEQ ID NO: 2562 - RNA, 19 nt, synthetic construct
  misc_feature 1..19: note = Targeting domain
  source 1..19: mol_type = other RNA
tggttccctatatatagaa

SEQ ID NO: 2563 - RNA, 23 nt, synthetic construct
  misc_feature 1..23: note = Targeting domain
  source 1..23: mol_type = other RNA
tggaatataagtcttttgatata

SEQ ID NO: 2564 - RNA, 18 nt, synthetic construct
  misc_feature 1..18: note = Targeting domain
  source 1..18: mol_type = other RNA
tataagtcttttgatata

SEQ ID NO: 2565 - RNA, 21 nt, synthetic construct
  misc_feature 1..21: note = Targeting domain
  source 1..21: mol_type = other RNA
tacaaaagaacatacataaga

SEQ ID NO: 2566 - RNA, 24 nt, synthetic construct
  misc_feature 1..24: note = CEP290-1758 targeting domain (RNA)
  source 1..24: mol_type = other RNA
tgcttaagaaaaaaaaggtaatgc

SEQ ID NO: 2567 - RNA, 21 nt, synthetic construct
  misc_feature 1..21: note = Targeting domain
  source 1..21: mol_type = other RNA
ttaagaaaaaaaaggtaatgc

SEQ ID NO: 2568 - skipped

SEQ ID NO: 2569 - RNA, 24 nt, synthetic construct
  misc_feature 1..24: note = Targeting domain
  source 1..24: mol_type = other RNA
ttttgaaacaggaatagaaattca

SEQ ID NO: 2570 - RNA, 23 nt, synthetic construct
  misc_feature 1..23: note = Targeting domain
  source 1..23: mol_type = other RNA
tttgaaacaggaatagaaattca

SEQ ID NO: 2571 - RNA, 22 nt, synthetic construct
  misc_feature 1..22: note = Targeting domain
  source 1..22: mol_type = other RNA
ttgaaacaggaatagaaattca

SEQ ID NO: 2572 - RNA, 21 nt, synthetic construct
  misc_feature 1..21: note = Targeting domain
  source 1..21: mol_type = other RNA
tgaaacaggaatagaaattca

SEQ ID NO: 2573 - RNA, 24 nt, synthetic construct
  misc_feature 1..24: note = Targeting domain
  source 1..24: mol_type = other RNA
ttttcttaagcatactttttttaa

SEQ ID NO: 2574 - RNA, 23 nt, synthetic construct
  misc_feature 1..23: note = Targeting domain
  source 1..23: mol_type = other RNA
tttcttaagcatactttttttaa

SEQ ID NO: 2575 - RNA, 22 nt, synthetic construct
  misc_feature 1..22: note = Targeting domain
  source 1..22: mol_type = other RNA
ttcttaagcatactttttttaa

SEQ ID NO: 2576 - RNA, 21 nt, synthetic construct
  misc_feature 1..21: note = CEP290-1768 targeting domain (RNA)
  source 1..21: mol_type = other RNA
tcttaagcatactttttttaa

SEQ ID NO: 2577 - RNA, 19 nt, synthetic construct
  misc_feature 1..19: note = Targeting domain
  source 1..19: mol_type = other RNA
ttaagcatactttttttaa

SEQ ID NO: 2578 - RNA, 18 nt, synthetic construct
  misc_feature 1..18: note = Targeting domain
  source 1..18: mol_type = other RNA
taagcatactttttttaa

SEQ ID NO: 2579 - RNA, 20 nt, synthetic construct
  misc_feature 1..20: note = Targeting domain
  source 1..20: mol_type = other RNA
tcactccactgcactccagc

SEQ ID NO: 2580 - RNA, 23 nt, synthetic construct
  misc_feature 1..23: note = CEP290-1772 targeting domain (RNA)
  source 1..23: mol_type = other RNA
agtttttaaggcggggagtcaca

SEQ ID NO: 2581 - RNA, 24 nt, synthetic construct
  misc_feature 1..24: note = Targeting domain
  source 1..24: mol_type = other RNA
aaactgtcaaaagctaccggttac

SEQ ID NO: 2582 - RNA, 23 nt, synthetic construct
  misc_feature 1..23: note = CEP290-1774 targeting domain (RNA)
  source 1..23: mol_type = other RNA
aactgtcaaaagctaccggttac

SEQ ID NO: 2583 - RNA, 22 nt, synthetic construct
  misc_feature 1..22: note = CEP290-252 targeting domain (RNA)
  source 1..22: mol_type = other RNA
actgtcaaaagctaccggttac

SEQ ID NO: 2584 - RNA, 24 nt, synthetic construct
  misc_feature 1..24: note = Targeting domain
  source 1..24: mol_type = other RNA
agttcatctcttgctctagatgac

SEQ ID NO: 2585 - RNA, 19 nt, synthetic construct
  misc_feature 1..19: note = Targeting domain
  source 1..19: mol_type = other RNA
atctcttgctctagatgac

SEQ ID NO: 2586 - RNA, 20 nt, synthetic construct
  misc_feature 1..20: note = Targeting domain
  source 1..20: mol_type = other RNA
acgaaaatcagatttcatgt

SEQ ID NO: 2587 - RNA, 21 nt, synthetic construct
  misc_feature 1..21: note = CEP290-1778 targeting domain (RNA)
  source 1..21: mol_type = other RNA
aatacatgagagtgattagtg

SEQ ID NO: 2588 - skipped

SEQ ID NO: 2589 - RNA, 18 nt, synthetic construct
  misc_feature 1..18: note = CEP290-1780 targeting domain (RNA)
  source 1..18: mol_type = other RNA
acatgagagtgattagtg

SEQ ID NO: 2590 - RNA, 23 nt, synthetic construct
  misc_feature 1..23: note = CEP290-1781 targeting domain (RNA)
  source 1..23: mol_type = other RNA
attagcttgaactctgtgccaaa

SEQ ID NO: 2591 - skipped

SEQ ID NO: 2592 - RNA, 23 nt, synthetic construct
  misc_feature 1..23: note = CEP290-1783 targeting domain (RNA)
  source 1..23: mol_type = other RNA
atgtagattgaggtagaatcaag

SEQ ID NO: 2593 - RNA, 19 nt, synthetic construct
  misc_feature 1..19: note = CEP290-1784 targeting domain (RNA)
  source 1..19: mol_type = other RNA
agattgaggtagaatcaag

SEQ ID NO: 2594 - RNA, 23 nt, synthetic construct
  misc_feature 1..23: note = CEP290-1785 targeting domain (RNA)
  source 1..23: mol_type = other RNA
ataagatgcagaactagtgtaga

SEQ ID NO: 2595 - RNA, 21 nt, synthetic construct
  misc_feature 1..21: note = CEP290-1786 targeting domain (RNA)
  source 1..21: mol_type = other RNA
aagatgcagaactagtgtaga

SEQ ID NO: 2596 - skipped

SEQ ID NO: 2597 - RNA, 18 nt, synthetic construct
  misc_feature 1..18: note = CEP290-1788 targeting domain (RNA)
  source 1..18: mol_type = other RNA
atgcagaactagtgtaga

SEQ ID NO: 2598 - RNA, 24 nt, synthetic construct
  misc_feature 1..24: note = Targeting domain
  source 1..24: mol_type = other RNA
atagatgtagattgaggtagaatc

SEQ ID NO: 2599 - RNA, 22 nt, synthetic construct
  misc_feature 1..22: note = Targeting domain
  source 1..22: mol_type = other RNA
agatgtagattgaggtagaatc

SEQ ID NO: 2600 - RNA, 20 nt, synthetic construct
  misc_feature 1..20: note = Targeting domain
  source 1..20: mol_type = other RNA
atgtagattgaggtagaatc

SEQ ID NO: 2601 - RNA, 24 nt, synthetic construct
  misc_feature 1..24: note = Targeting domain
  source 1..24: mol_type = other RNA
agaatgatcattcttgtggcagta

SEQ ID NO: 2602 - RNA, 22 nt, synthetic construct
  misc_feature 1..22: note = Targeting domain
  source 1..22: mol_type = other RNA
aatgatcattcttgtggcagta

SEQ ID NO: 2603 - RNA, 21 nt, synthetic construct
  misc_feature 1..21: note = Targeting domain
  source 1..21: mol_type = other RNA
atgatcattcttgtggcagta

SEQ ID NO: 2604 - RNA, 18 nt, synthetic construct
  misc_feature 1..18: note = Targeting domain
  source 1..18: mol_type = other RNA
atcattcttgtggcagta

SEQ ID NO: 2605 - RNA, 23 nt, synthetic construct
  misc_feature 1..23: note = Targeting domain
  source 1..23: mol_type = other RNA
agaatgatcattcttgtggcagt

SEQ ID NO: 2606 - RNA, 21 nt, synthetic construct
  misc_feature 1..21: note = Targeting domain
  source 1..21: mol_type = other RNA
aatgatcattcttgtggcagt

SEQ ID NO: 2607 - skipped

SEQ ID NO: 2608 - RNA, 21 nt, synthetic construct
  misc_feature 1..21: note = Targeting domain
  source 1..21: mol_type = other RNA
agaggtaaaggttcatgagac

SEQ ID NO: 2609 - RNA, 19 nt, synthetic construct
  misc_feature 1..19: note = Targeting domain
  source 1..19: mol_type = other RNA
aggtaaaggttcatgagac

SEQ ID NO: 2610 - skipped

SEQ ID NO: 2611 - RNA, 22 nt, synthetic construct
  misc_feature 1..22: note = Targeting domain
  source 1..22: mol_type = other RNA
agcttttgacagtttttaaggc

SEQ ID NO: 2612 - RNA, 23 nt, synthetic construct
  misc_feature 1..23: note = Targeting domain
  source 1..23: mol_type = other RNA
agaaattcactgagcaaaacaac

SEQ ID NO: 2613 - RNA, 21 nt, synthetic construct
  misc_feature 1..21: note = Targeting domain
  source 1..21: mol_type = other RNA
aaattcactgagcaaaacaac

SEQ ID NO: 2614 - skipped

SEQ ID NO: 2615 - RNA, 19 nt, synthetic construct
  misc_feature 1..19: note = Targeting domain
  source 1..19: mol_type = other RNA
attcactgagcaaaacaac

SEQ ID NO: 2616 - RNA, 18 nt, synthetic construct
  misc_feature 1..18: note = Targeting domain
  source 1..18: mol_type = other RNA
agtaaggaggatgtaaga

SEQ ID NO: 2617 - RNA, 23 nt, synthetic construct
  misc_feature 1..23: note = Targeting domain
  source 1..23: mol_type = other RNA
atcaaaagacttatattccatta

SEQ ID NO: 2618 - skipped

SEQ ID NO: 2619 - RNA, 19 nt, synthetic construct
  misc_feature 1..19: note = Targeting domain
  source 1..19: mol_type = other RNA
aaagacttatattccatta

SEQ ID NO: 2620 - RNA, 18 nt, synthetic construct
  misc_feature 1..18: note = Targeting domain
  source 1..18: mol_type = other RNA
aagacttatattccatta

SEQ ID NO: 2621 - RNA, 21 nt, synthetic construct
  misc_feature 1..21: note = Targeting domain
  source 1..21: mol_type = other RNA
aggaaattattgttgcttttt

SEQ ID NO: 2622 - RNA, 18 nt, synthetic construct
  misc_feature 1..18: note = Targeting domain
  source 1..18: mol_type = other RNA
aaattattgttgcttttt

SEQ ID NO: 2623 - RNA, 24 nt, synthetic construct
  misc_feature 1..24: note = Targeting domain
  source 1..24: mol_type = other RNA
aaagaaaaacttgaaatttgatag

SEQ ID NO: 2624 - RNA, 23 nt, synthetic construct
  misc_feature 1..23: note = Targeting domain
  source 1..23: mol_type = other RNA
aagaaaaacttgaaatttgatag

SEQ ID NO: 2625 - RNA, 22 nt, synthetic construct
  misc_feature 1..22: note = Targeting domain
  source 1..22: mol_type = other RNA
agaaaaacttgaaatttgatag

SEQ ID NO: 2626 - RNA, 20 nt, synthetic construct
  misc_feature 1..20: note = Targeting domain
  source 1..20: mol_type = other RNA
aaaaacttgaaatttgatag

SEQ ID NO: 2627 - RNA, 19 nt, synthetic construct
  misc_feature 1..19: note = Targeting domain
  source 1..19: mol_type = other RNA
aaaacttgaaatttgatag

SEQ ID NO: 2628 - RNA, 18 nt, synthetic construct
  misc_feature 1..18: note = Targeting domain
  source 1..18: mol_type = other RNA
aaacttgaaatttgatag

SEQ ID NO: 2629 - RNA, 23 nt, synthetic construct
  misc_feature 1..23: note = Targeting domain
  source 1..23: mol_type = other RNA
aagaaaaaagaaatagatgtaga

SEQ ID NO: 2630 - RNA, 22 nt, synthetic construct
  misc_feature 1..22: note = Targeting domain
  source 1..22: mol_type = other RNA
agaaaaaagaaatagatgtaga

SEQ ID NO: 2631 - RNA, 20 nt, synthetic construct
  misc_feature 1..20: note = Targeting domain
  source 1..20: mol_type = other RNA
aaaaaagaaatagatgtaga

SEQ ID NO: 2632 - RNA, 19 nt, synthetic construct
  misc_feature 1..19: note = Targeting domain
  source 1..19: mol_type = other RNA
aaaaagaaatagatgtaga

SEQ ID NO: 2633 - RNA, 18 nt, synthetic construct
  misc_feature 1..18: note = Targeting domain
  source 1..18: mol_type = other RNA
aaaagaaatagatgtaga

SEQ ID NO: 2634 - RNA, 23 nt, synthetic construct
  misc_feature 1..23: note = Targeting domain
  source 1..23: mol_type = other RNA
agagtctcactgtgttgcccagg

SEQ ID NO: 2635 - RNA, 21 nt, synthetic construct
  misc_feature 1..21: note = Targeting domain
  source 1..21: mol_type = other RNA
agtctcactgtgttgcccagg

SEQ ID NO: 2636 - RNA, 24 nt, synthetic construct
  misc_feature 1..24: note = Targeting domain
  source 1..24: mol_type = other RNA
cagtttttaaggcggggagtcaca

SEQ ID NO: 2637 - RNA, 21 nt, synthetic construct
  misc_feature 1..21: note = Targeting domain
  source 1..21: mol_type = other RNA
ctgtcaaaagctaccggttac

SEQ ID NO: 2638 - skipped

SEQ ID NO: 2639 - RNA, 21 nt, synthetic construct
  misc_feature 1..21: note = Targeting domain
  source 1..21: mol_type = other RNA
cacgaaaatcagatttcatgt

SEQ ID NO: 2640 - RNA, 19 nt, synthetic construct
  misc_feature 1..19: note = Targeting domain
  source 1..19: mol_type = other RNA
cgaaaatcagatttcatgt

SEQ ID NO: 2641 - RNA, 23 nt, synthetic construct
  misc_feature 1..23: note = Targeting domain
  source 1..23: mol_type = other RNA
ctaatacatgagagtgattagtg

SEQ ID NO: 2642 - RNA, 18 nt, synthetic construct
  misc_feature 1..18: note = Targeting domain
  source 1..18: mol_type = other RNA
cttgaactctgtgccaaa

SEQ ID NO: 2643 - RNA, 21 nt, synthetic construct
  misc_feature 1..21: note = Targeting domain
  source 1..21: mol_type = other RNA
ctctagatgacatgaggtaag

SEQ ID NO: 2644 - RNA, 19 nt, synthetic construct
  misc_feature 1..19: note = Targeting domain
  source 1..19: mol_type = other RNA
ctagatgacatgaggtaag

SEQ ID NO: 2645 - RNA, 24 nt, synthetic construct
  misc_feature 1..24: note = Targeting domain
  source 1..24: mol_type = other RNA
cggtagcttttgacagtttttaag

SEQ ID NO: 2646 - RNA, 18 nt, synthetic construct
  misc_feature 1..18: note = Targeting domain
  source 1..18: mol_type = other RNA
cttttgacagtttttaag

SEQ ID NO: 2647 - skipped

SEQ ID NO: 2648 - RNA, 19 nt, synthetic construct
  misc_feature 1..19: note = Targeting domain
  source 1..19: mol_type = other RNA
cagtaaggaggatgtaaga

SEQ ID NO: 2649 - RNA, 21 nt, synthetic construct
  misc_feature 1..21: note = Targeting domain
  source 1..21: mol_type = other RNA
caaaagacttatattccatta

SEQ ID NO: 2650 - RNA, 24 nt, synthetic construct
  misc_feature 1..24: note = Targeting domain
  source 1..24: mol_type = other RNA
cttaggaaattattgttgcttttt

SEQ ID NO: 2651 - RNA, 24 nt, synthetic construct
  misc_feature 1..24: note = Targeting domain
  source 1..24: mol_type = other RNA
ctgtgttgcccaggctggagtgca

SEQ ID NO: 2652 - RNA, 24 nt, synthetic construct
  misc_feature 1..24: note = Targeting domain
  source 1..24: mol_type = other RNA
cagagtctcactgtgttgcccagg

SEQ ID NO: 2653 - RNA, 18 nt, synthetic construct
  misc_feature 1..18: note = Targeting domain
  source 1..18: mol_type = other RNA
ctcactgtgttgcccagg

SEQ ID NO: 2654 - RNA, 22 nt, synthetic construct
  misc_feature 1..22: note = Targeting domain
  source 1..22: mol_type = other RNA
gtttttaaggcggggagtcaca

SEQ ID NO: 2655 - RNA, 19 nt, synthetic construct
  misc_feature 1..19: note = CEP290-1846 targeting domain (RNA)
  source 1..19: mol_type = other RNA
gtcaaaagctaccggttac

SEQ ID NO: 2656 - RNA, 23 nt, synthetic construct
  misc_feature 1..23: note = Targeting domain
  source 1..23: mol_type = other RNA
gttcatctcttgctctagatgac

SEQ ID NO: 2657 - RNA, 24 nt, synthetic construct
  misc_feature 1..24: note = Targeting domain
  source 1..24: mol_type = other RNA
ggtcacgaaaatcagatttcatgt

SEQ ID NO: 2658 - RNA, 23 nt, synthetic construct
  misc_feature 1..23: note = Targeting domain
  source 1..23: mol_type = other RNA
gtcacgaaaatcagatttcatgt

SEQ ID NO: 2659 - RNA, 18 nt, synthetic construct
  misc_feature 1..18: note = Targeting domain
  source 1..18: mol_type = other RNA
gaaaatcagatttcatgt

SEQ ID NO: 2660 - RNA, 24 nt, synthetic construct
  misc_feature 1..24: note = Targeting domain
  source 1..24: mol_type = other RNA
gctaatacatgagagtgattagtg

SEQ ID NO: 2661 - RNA, 19 nt, synthetic construct
  misc_feature 1..19: note = Targeting domain
  source 1..19: mol_type = other RNA
gcttgaactctgtgccaaa

SEQ ID NO: 2662 - RNA, 22 nt, synthetic construct
  misc_feature 1..22: note = Targeting domain
  source 1..22: mol_type = other RNA
gctctagatgacatgaggtaag

SEQ ID NO: 2663 - RNA, 24 nt, synthetic construct
  misc_feature 1..24: note = Targeting domain
  source 1..24: mol_type = other RNA
gatgtagattgaggtagaatcaag

SEQ ID NO: 2664 - RNA, 21 nt, synthetic construct
  misc_feature 1..21: note = Targeting domain
  source 1..21: mol_type = other RNA
gtagattgaggtagaatcaag

SEQ ID NO: 2665 - RNA, 18 nt, synthetic construct
  misc_feature 1..18: note = Targeting domain
  source 1..18: mol_type = other RNA
gattgaggtagaatcaag

SEQ ID NO: 2666 - RNA, 19 nt, synthetic construct
  misc_feature 1..19: note = Targeting domain
  source 1..19: mol_type = other RNA
gatgcagaactagtgtaga

SEQ ID NO: 2667 - RNA, 21 nt, synthetic construct
  misc_feature 1..21: note = Targeting domain
  source 1..21: mol_type = other RNA
gatgtagattgaggtagaatc

SEQ ID NO: 2668 - RNA, 18 nt, synthetic construct
  misc_feature 1..18: note = Targeting domain
  source 1..18: mol_type = other RNA
gtagattgaggtagaatc

SEQ ID NO: 2669 - RNA, 23 nt, synthetic construct
  misc_feature 1..23: note = Targeting domain
  source 1..23: mol_type = other RNA
gaatgatcattcttgtggcagta

SEQ ID NO: 2670 - RNA, 19 nt, synthetic construct
  misc_feature 1..19: note = Targeting domain
  source 1..19: mol_type = other RNA
gatcattcttgtggcagta

SEQ ID NO: 2671 - RNA, 22 nt, synthetic construct
  misc_feature 1..22: note = Targeting domain
  source 1..22: mol_type = other RNA
gaatgatcattcttgtggcagt

SEQ ID NO: 2672 - RNA, 18 nt, synthetic construct
  misc_feature 1..18: note = Targeting domain
  source 1..18: mol_type = other RNA
gatcattcttgtggcagt

SEQ ID NO: 2673 - RNA, 22 nt, synthetic construct
  misc_feature 1..22: note = Targeting domain
  source 1..22: mol_type = other RNA
gagaggtaaaggttcatgagac

SEQ ID NO: 2674 - RNA, 20 nt, synthetic construct
  misc_feature 1..20: note = Targeting domain
  source 1..20: mol_type = other RNA
gaggtaaaggttcatgagac

SEQ ID NO: 2675 - RNA, 18 nt, synthetic construct
  misc_feature 1..18: note = Targeting domain
  source 1..18: mol_type = other RNA
ggtaaaggttcatgagac

SEQ ID NO: 2676 - RNA, 23 nt, synthetic construct
  misc_feature 1..23: note = Targeting domain
  source 1..23: mol_type = other RNA
ggtagcttttgacagtttttaag

SEQ ID NO: 2677 - RNA, 22 nt, synthetic construct
  misc_feature 1..22: note = Targeting domain
  source 1..22: mol_type = other RNA
gtagcttttgacagtttttaag

SEQ ID NO: 2678 - RNA, 19 nt, synthetic construct
  misc_feature 1..19: note = Targeting domain
  source 1..19: mol_type = other RNA
gcttttgacagtttttaag

SEQ ID NO: 2679 - RNA, 24 nt, synthetic construct
  misc_feature 1..24: note = Targeting domain
  source 1..24: mol_type = other RNA
gtagcttttgacagtttttaaggc

SEQ ID NO: 2680 - RNA, 21 nt, synthetic construct
  misc_feature 1..21: note = Targeting domain
  source 1..21: mol_type = other RNA
gcttttgacagtttttaaggc

SEQ ID NO: 2681 - RNA, 22 nt, synthetic construct
  misc_feature 1..22: note = Targeting domain
  source 1..22: mol_type = other RNA
gaaattcactgagcaaaacaac

SEQ ID NO: 2682 - RNA, 23 nt, synthetic construct
  misc_feature 1..23: note = Targeting domain
  source 1..23: mol_type = other RNA
gtggcagtaaggaggatgtaaga

SEQ ID NO: 2683 - RNA, 21 nt, synthetic construct
  misc_feature 1..21: note = Targeting domain
  source 1..21: mol_type = other RNA
ggcagtaaggaggatgtaaga

SEQ ID NO: 2684 - skipped

SEQ ID NO: 2685 - RNA, 20 nt, synthetic construct
  misc_feature 1..20: note = Targeting domain
  source 1..20: mol_type = other RNA
ggaaattattgttgcttttt

SEQ ID NO: 2686 - RNA, 19 nt, synthetic construct
  misc_feature 1..19: note = Targeting domain
  source 1..19: mol_type = other RNA
gaaattattgttgcttttt

SEQ ID NO: 2687 - RNA, 21 nt, synthetic construct
  misc_feature 1..21: note = Targeting domain
  source 1..21: mol_type = other RNA
gaaaaacttgaaatttgatag

SEQ ID NO: 2688 - RNA, 24 nt, synthetic construct
  misc_feature 1..24: note = Targeting domain
  source 1..24: mol_type = other RNA
gaagaaaaaagaaatagatgtaga

SEQ ID NO: 2689 - RNA, 21 nt, synthetic construct
  misc_feature 1..21: note = Targeting domain
  source 1..21: mol_type = other RNA
gaaaaaagaaatagatgtaga

SEQ ID NO: 2690 - RNA, 22 nt, synthetic construct
  misc_feature 1..22: note = Targeting domain
  source 1..22: mol_type = other RNA
gtgttgcccaggctggagtgca

SEQ ID NO: 2691 - RNA, 20 nt, synthetic construct
  misc_feature 1..20: note = Targeting domain
  source 1..20: mol_type = other RNA
gttgcccaggctggagtgca

SEQ ID NO: 2692 - RNA, 22 nt, synthetic construct
  misc_feature 1..22: note = Targeting domain
  source 1..22: mol_type = other RNA
gagtctcactgtgttgcccagg

SEQ ID NO: 2693 - RNA, 20 nt, synthetic construct
  misc_feature 1..20: note = Targeting domain
  source 1..20: mol_type = other RNA
gtctcactgtgttgcccagg

SEQ ID NO: 2694 - RNA, 21 nt, synthetic construct
  misc_feature 1..21: note = Targeting domain
  source 1..21: mol_type = other RNA
tttttaaggcggggagtcaca

SEQ ID NO: 2695 - skipped

SEQ ID NO: 2696 - RNA, 19 nt, synthetic construct
  misc_feature 1..19: note = Targeting domain
  source 1..19: mol_type = other RNA
tttaaggcggggagtcaca

SEQ ID NO: 2697 - RNA, 18 nt, synthetic construct
  misc_feature 1..18: note = Targeting domain
  source 1..18: mol_type = other RNA
ttaaggcggggagtcaca

SEQ ID NO: 2698 - skipped

SEQ ID NO: 2699 - RNA, 18 nt, synthetic construct
  misc_feature 1..18: note = Targeting domain
  source 1..18: mol_type = other RNA
tcaaaagctaccggttac

SEQ ID NO: 2700 - RNA, 22 nt, synthetic construct
  misc_feature 1..22: note = Targeting domain
  source 1..22: mol_type = other RNA
ttcatctcttgctctagatgac

SEQ ID NO: 2701 - RNA, 21 nt, synthetic construct
  misc_feature 1..21: note = Targeting domain
  source 1..21: mol_type = other RNA
tcatctcttgctctagatgac

SEQ ID NO: 2702 - RNA, 18 nt, synthetic construct
  misc_feature 1..18: note = Targeting domain
  source 1..18: mol_type = other RNA
tctcttgctctagatgac

SEQ ID NO: 2703 - RNA, 22 nt, synthetic construct
  misc_feature 1..22: note = Targeting domain
  source 1..22: mol_type = other RNA
tcacgaaaatcagatttcatgt

SEQ ID NO: 2704 - RNA, 22 nt, synthetic construct
  misc_feature 1..22: note = Targeting domain
  source 1..22: mol_type = other RNA
taatacatgagagtgattagtg

SEQ ID NO: 2705 - RNA, 19 nt, synthetic construct
  misc_feature 1..19: note = Targeting domain
  source 1..19: mol_type = other RNA
tacatgagagtgattagtg

SEQ ID NO: 2706 - RNA, 24 nt, synthetic construct
  misc_feature 1..24: note = Targeting domain
  source 1..24: mol_type = other RNA
tattagcttgaactctgtgccaaa

SEQ ID NO: 2707 - RNA, 22 nt, synthetic construct
  misc_feature 1..22: note = Targeting domain
  source 1..22: mol_type = other RNA
ttagcttgaactctgtgccaaa

SEQ ID NO: 2708 - RNA, 21 nt, synthetic construct
  misc_feature 1..21: note = Targeting domain
  source 1..21: mol_type = other RNA
tagcttgaactctgtgccaaa

SEQ ID NO: 2709 - RNA, 24 nt, synthetic construct
  misc_feature 1..24: note = Targeting domain
  source 1..24: mol_type = other RNA
ttgctctagatgacatgaggtaag

SEQ ID NO: 2710 - RNA, 23 nt, synthetic construct
  misc_feature 1..23: note = Targeting domain
  source 1..23: mol_type = other RNA
tgctctagatgacatgaggtaag

SEQ ID NO: 2711 - skipped

SEQ ID NO: 2712 - RNA, 18 nt, synthetic construct
  misc_feature 1..18: note = Targeting domain
  source 1..18: mol_type = other RNA
tagatgacatgaggtaag

SEQ ID NO: 2713 - RNA, 22 nt, synthetic construct
  misc_feature 1..22: note = Targeting domain
  source 1..22: mol_type = other RNA
tgtagattgaggtagaatcaag

SEQ ID NO: 2714 - RNA, 20 nt, synthetic construct
  misc_feature 1..20: note = Targeting domain
  source 1..20: mol_type = other RNA
tagattgaggtagaatcaag

SEQ ID NO: 2715 - RNA, 24 nt, synthetic construct
  misc_feature 1..24: note = Targeting domain
  source 1..24: mol_type = other RNA
tataagatgcagaactagtgtaga

SEQ ID NO: 2716 - RNA, 22 nt, synthetic construct
  misc_feature 1..22: note = Targeting domain
  source 1..22: mol_type = other RNA
taagatgcagaactagtgtaga

SEQ ID NO: 2717 - RNA, 23 nt, synthetic construct
  misc_feature 1..23: note = Targeting domain
  source 1..23: mol_type = other RNA
tagatgtagattgaggtagaatc

SEQ ID NO: 2718 - RNA, 19 nt, synthetic construct
  misc_feature 1..19: note = Targeting domain
  source 1..19: mol_type = other RNA
tgtagattgaggtagaatc

SEQ ID NO: 2719 - skipped

SEQ ID NO: 2720 - RNA, 24 nt, synthetic construct
  misc_feature 1..24: note = Targeting domain
  source 1..24: mol_type = other RNA
tagaatgatcattcttgtggcagt

SEQ ID NO: 2721 - RNA, 19 nt, synthetic construct
  misc_feature 1..19: note = Targeting domain
  source 1..19: mol_type = other RNA
tgatcattcttgtggcagt

SEQ ID NO: 2722 - RNA, 24 nt, synthetic construct
  misc_feature 1..24: note = Targeting domain
  source 1..24: mol_type = other RNA
ttgagaggtaaaggttcatgagac

SEQ ID NO: 2723 - RNA, 23 nt, synthetic construct
  misc_feature 1..23: note = Targeting domain
  source 1..23: mol_type = other RNA
tgagaggtaaaggttcatgagac

SEQ ID NO: 2724 - RNA, 21 nt, synthetic construct
  misc_feature 1..21: note = CEP290-1915 targeting domain (RNA)
  source 1..21: mol_type = other RNA
tagcttttgacagtttttaag

SEQ ID NO: 2725 - RNA, 23 nt, synthetic construct
  misc_feature 1..23: note = Targeting domain
  source 1..23: mol_type = other RNA
tagcttttgacagtttttaaggc

SEQ ID NO: 2726 - RNA, 19 nt, synthetic construct
  misc_feature 1..19: note = Targeting domain
  source 1..19: mol_type = other RNA
ttttgacagtttttaaggc

SEQ ID NO: 2727 - RNA, 18 nt, synthetic construct
  misc_feature 1..18: note = CEP290-1918 targeting domain (RNA)
  source 1..18: mol_type = other RNA
tttgacagtttttaaggc

SEQ ID NO: 2728 - RNA, 24 nt, synthetic construct
  misc_feature 1..24: note = Targeting domain
  source 1..24: mol_type = other RNA
tagaaattcactgagcaaaacaac

SEQ ID NO: 2729 - RNA, 18 nt, synthetic construct
  misc_feature 1..18: note = Targeting domain
  source 1..18: mol_type = other RNA
ttcactgagcaaaacaac

SEQ ID NO: 2730 - RNA, 24 nt, synthetic construct
  misc_feature 1..24: note = Targeting domain
  source 1..24: mol_type = other RNA
tgtggcagtaaggaggatgtaaga

SEQ ID NO: 2731 - RNA, 22 nt, synthetic construct
  misc_feature 1..22: note = Targeting domain
  source 1..22: mol_type = other RNA
tggcagtaaggaggatgtaaga

SEQ ID NO: 2732 - RNA, 24 nt, synthetic construct
  misc_feature 1..24: note = Targeting domain
  source 1..24: mol_type = other RNA
tatcaaaagacttatattccatta

SEQ ID NO: 2733 - RNA, 22 nt, synthetic construct
  misc_feature 1..22: note = Targeting domain
  source 1..22: mol_type = other RNA
tcaaaagacttatattccatta

SEQ ID NO: 2734 - RNA, 23 nt, synthetic construct
  misc_feature 1..23: note = Targeting domain
  source 1..23: mol_type = other RNA
ttaggaaattattgttgcttttt

SEQ ID NO: 2735 - RNA, 22 nt, synthetic construct
  misc_feature 1..22: note = Targeting domain
  source 1..22: mol_type = other RNA
taggaaattattgttgcttttt

SEQ ID NO: 2736 - RNA, 23 nt, synthetic construct
  misc_feature 1..23: note = CEP290-1927 targeting domain
  source 1..23: mol_type = other RNA
tgtgttgcccaggctggagtgca

SEQ ID NO: 2737 - RNA, 21 nt, synthetic construct
  misc_feature 1..21: note = Targeting domain
  source 1..21: mol_type = other RNA
tgttgcccaggctggagtgca

SEQ ID NO: 2738 - RNA, 19 nt, synthetic construct
  misc_feature 1..19: note = Targeting domain
  source 1..19: mol_type = other RNA
ttgcccaggctggagtgca

SEQ ID NO: 2739 - RNA, 18 nt, synthetic construct
  misc_feature 1..18: note = CEP290-1930 targeting domain
  source 1..18: mol_type = other RNA
tgcccaggctggagtgca

SEQ ID NO: 2740 - RNA, 19 nt, synthetic construct
  misc_feature 1..19: note = CEP290-1931 targeting domain
  source 1..19: mol_type = other RNA
tctcactgtgttgcccagg

SEQ ID NO: 2741-2747 - skipped (7 entries)

SEQ ID NO: 2748 - RNA, 20 nt, synthetic construct
  misc_feature 1..20: note = CEP290-1940 targeting domain (RNA)
  source 1..20: mol_type = other RNA
acttaatgagtgcttccctc

SEQ ID NO: 2749-2751 - skipped (3 entries)

SEQ ID NO: 2752 - RNA, 17 nt, synthetic construct
  misc_feature 1..17: note = CEP290-1944 targeting domain (RNA)
  source 1..17: mol_type = other RNA
agggtctggtccatatt

SEQ ID NO: 2753 - RNA, 20 nt, synthetic construct
  misc_feature 1..20: note = CEP290-1945 targeting domain (RNA)
  source 1..20: mol_type = other RNA
atagtggctgaatgacttct

SEQ ID NO: 2754 - RNA, 17 nt, synthetic construct
  misc_feature 1..17: note = CEP290-1946 targeting domain (RNA)
  source 1..17: mol_type = other RNA
atgtctggttaaaagag

SEQ ID NO: 2755 - RNA, 20 nt, synthetic construct
  misc_feature 1..20: note = CEP290-1947 targeting domain (RNA)
  source 1..20: mol_type = other RNA
caaagggtctggtccatatt

SEQ ID NO: 2756-2760 - skipped (5 entries)

SEQ ID NO: 2761 - RNA, 17 nt, synthetic construct
  misc_feature 1..17: note = CEP290-1953 targeting domain (RNA)
  source 1..17: mol_type = other RNA
taatgagtgcttccctc

SEQ ID NO: 2762 - RNA, 20 nt, synthetic construct
  misc_feature 1..20: note = CEP290-1954 targeting domain (RNA)
  source 1..20: mol_type = other RNA
tagatgtctggttaaaagag

SEQ ID NO: 2763 - RNA, 20 nt, synthetic construct
  misc_feature 1..20: note = CEP290-1955 targeting domain (RNA)
  source 1..20: mol_type = other RNA
tcattctccttaggtcactt

SEQ ID NO: 2764 - skipped

SEQ ID NO: 2765 - RNA, 17 nt, synthetic construct
  misc_feature 1..17: note = CEP290-1957 targeting domain (RNA)
  source 1..17: mol_type = other RNA
ttctccttaggtcactt

SEQ ID NO: 2766 - RNA, 17 nt, synthetic construct
  misc_feature 1..17: note = CEP290-1958 targeting domain (RNA)
  source 1..17: mol_type = other RNA
aagaaaaaagaaataga

SEQ ID NO: 2767 - RNA, 20 nt, synthetic construct
  misc_feature 1..20: note = CEP290-1959 targeting domain (RNA)
  source 1..20: mol_type = other RNA
agattgaggtagaatcaaga

SEQ ID NO: 2768 - skipped

SEQ ID NO: 2769 - RNA, 17 nt, synthetic construct
  misc_feature 1..17: note = CEP290-1961 targeting domain (RNA)
  source 1..17: mol_type = other RNA
caaaaaaagaatcctct

SEQ ID NO: 2770 - RNA, 20 nt, synthetic construct
  misc_feature 1..20: note = CEP290-1962 targeting domain (RNA)
  source 1..20: mol_type = other RNA
caacaaaaaaagaatcctct

SEQ ID NO: 2771 - skipped

SEQ ID NO: 2772 - RNA, 17 nt, synthetic construct
  misc_feature 1..17: note = CEP290-1964 targeting domain (RNA)
  source 1..17: mol_type = other RNA
cattcttcacacatgaa

SEQ ID NO: 2773 - RNA, 20 nt, synthetic construct
  misc_feature 1..20: note = CEP290-1965 targeting domain (RNA)
  source 1..20: mol_type = other RNA
tagaagaaaaaagaaataga

SEQ ID NO: 2774 - RNA, 20 nt, synthetic construct
  misc_feature 1..20: note = CEP290-1966 targeting domain (RNA)
  source 1..20: mol_type = other RNA
tgagactagaggtcacgaaa

SEQ ID NO: 2775 - skipped

SEQ ID NO: 2776 - RNA, 20 nt, synthetic construct
  misc_feature 1..20: note = CEP290-1968 targeting domain (RNA)
  source 1..20: mol_type = other RNA
ttccattcttcacacatgaa

SEQ ID NO: 2777 - RNA, 17 nt, synthetic construct
  misc_feature 1..17: note = CEP290-1969 targeting domain (RNA)
  source 1..17: mol_type = other RNA
ttgaggtagaatcaaga

SEQ ID NO: 2778 - skipped

SEQ ID NO: 2779 - RNA, 102 nt, synthetic construct
  misc_feature 1..102: note = S. aureus gRNA
  misc_feature 1..20: note = Targeting domain, each n is a, c, u, g, unknown, or other
  source 1..102: mol_type = other RNA
nnnnnnnnnnnnnnnnnnnngttttagtactctggaaacagaatctactaaaacaaggcaaaatgccgtgtttatctcgtcaacttgttggcgagatttttt

SEQ ID NO: 2780 - RNA, 17 nt, synthetic construct
  misc_feature 1..17: note = CEP290-B41/-B1291 targeting domain (RNA)
  source 1..17: mol_type = other RNA
tcattcttgtggcagta

SEQ ID NO: 2781 - DNA, 22 bp, synthetic construct
  misc_feature 1..22: note = CEP290-230 targeting domain (DNA)
  source 1..22: mol_type = other DNA
ggcacagagttcaagctaatac

SEQ ID NO: 2782 - DNA, 22 bp, synthetic construct
  misc_feature 1..22: note = CEP290-312/-926 targeting domain (DNA)
  source 1..22: mol_type = other DNA
gactcataatttagtaggaatc

SEQ ID NO: 2783 - DNA, 20 bp, synthetic construct
  misc_feature 1..20: note = CEP290-B1036/-482 targeting domain (DNA)
  source 1..20: mol_type = other DNA
gaaatagaggcttatggatt

SEQ ID NO: 2784 - DNA, 19 bp, synthetic construct
  misc_feature 1..19: note = CEP290-485 targeting domain (DNA)
  source 1..19: mol_type = other DNA
ggataggacagaggacatg

SEQ ID NO: 2785 - DNA, 102 bp, synthetic construct
  misc_feature 1..102: note = S. aureus gRNA
  misc_feature 1..20: note = Targeting domain, each n is a, c, t, g, unknown, or other
  source 1..102: mol_type = other DNA
nnnnnnnnnnnnnnnnnnnngttttagtactctggaaacagaatctactaaaacaaggcaaaatgccgtgtttatctcgtcaacttgttggcgagatttttt

SEQ ID NO: 2786 - RNA, 102 nt, synthetic construct
  misc_feature 1..102: note = S. aureus gRNA
  misc_feature 1..20: note = Targeting domain, each n is a, c, u, g, unknown, or other
  source 1..102: mol_type = other RNA
nnnnnnnnnnnnnnnnnnnngttatagtactctggaaacagaatctactataacaaggcaaaatgccgtgtttatctcgtcaacttgttggcgagatttttt

SEQ ID NO: 2787 - DNA, 102 bp, synthetic construct
  misc_feature 1..102: note = S. aureus gRNA
  misc_feature 1..20: note = Targeting domain, each n is a, c, t, g, unknown, or other
  source 1..102: mol_type = other DNA
nnnnnnnnnnnnnnnnnnnngttatagtactctggaaacagaatctactataacaaggcaaaatgccgtgtttatctcgtcaacttgttggcgagatttttt

SEQ ID NO: 2788 - DNA, 36 bp, Mus musculus
  source 1..36: mol_type = other DNA
ccctcaaacacatgtctcacgcagcttagacattct

SEQ ID NO: 2789 - DNA, 35 bp, Mus musculus
  source 1..35: mol_type = other DNA
cagaactcggtcagcatgctacagatagcttatct

SEQ ID NO: 2790 - DNA, 36 bp, Mus musculus
  source 1..36: mol_type = other DNA
cagaactcggtcaggcatgctacagatagcttatct

SEQ ID NO: 2791 - DNA, 31 bp, Mus musculus
  source 1..31: mol_type = other DNA
cagaactcggcatgctacagatagcttatct

SEQ ID NO: 2792 - skipped

SEQ ID NO: 2793 - DNA, 21 bp, Mus musculus
  source 1..21: mol_type = other DNA
catgctacagatagcttatct

SEQ ID NO: 2794 - DNA, 21 bp, synthetic construct
  misc_feature 1..21: note = C1 targeting domain (DNA)
  source 1..21: mol_type = other DNA
ggccggctaatttagtagaga

SEQ ID NO: 2795 - RNA, 21 nt, synthetic construct
  misc_feature 1..21: note = C1 targeting domain (RNA)
  source 1..21: mol_type = other RNA
ggccggctaatttagtagaga

SEQ ID NO: 2796 - DNA, 20 bp, synthetic construct
  misc_feature 1..20: note = C2 targeting domain (DNA)
  source 1..20: mol_type = other DNA
gttatgaagaataatacaaa

SEQ ID NO: 2797 - RNA, 20 nt, synthetic construct
  misc_feature 1..20: note = C2 targeting domain (RNA)
  source 1..20: mol_type = other RNA
gttatgaagaataatacaaa

SEQ ID NO: 2798 - DNA, 5120 bp, synthetic construct
  misc_feature 1..5120: note = pAD26/SplitGFP+WildType/CEP290/Kan
  source 1..5120: mol_type = other DNA
acataacttacggtaaatggcccgcctggctgaccgcccaacgacccccgcccattgacgtcaataatgacgtatgttcccatagtaacgccaatagggactttccattgacgtcaatgggtggactatttacggtaaactgcccacttggcagtacatcaagtgtatcatatgccaagtacgccccctattgacgtcaatgacggtaaatggcccgcctggcattatgcccagtacatgaccttatgggactttcctacttggcagtacatctacgtattagtcatcgctattaccatggtgatgcggttttggcagtacatcaatgggcgtggatagcggtttgactcacggggatttccaagtctccaccccattgacgtcaatgggagtttgttttggcaccaaaatcaacgggactttccaaaatgtcgtaacaactccgccccattgacgcaaatgggcggtaggcgtgtacggtgggaggtctatataagcagagctggtttagtgaaccgtcagatccgctagagatccgcggccgctaatacgactcactatagggagagccgccaccatggtgagcaagggcgaggagctgttcaccggggtggtgcccatcctggtcgagctggacggcgacgtaaacggccacaagttcagcgtgtccggcgagggcgagggcgatgccacctacggcaagctgaccctgaagttcatctgcaccaccggcaagctgcccgtgccctggcccaccctcgtgaccaccctgacctacggaggtaagtttgtgtgattcttgaaccttgtgaaattagccatttttcttcaatatttttgtgtttggggggatttggcagattttaattaaagtttgcctgcatttatataaatttaacagagatataattatccatattattcattgtggctgaatgacttctgaatgattatctagatcattctccttaggtcacttgcatgatttagctgaatcaaacctcttttaaccagacatctaagagaaaaaggagcatgaaacaggtagaatattgtaatcaaaggagggaagcactcattaagtgcccatccctttctcttacccctgtacccagaacaaactattctcccatggtccctggcttttgttccttggaatggatgtagccaacagtagctgaaatattaagggctcttcctggaccatggatgcactctgtaaattctcatcattttttattgtagaataaatgtagaattttaatgtagaataaatttatttaatgtagaataaaaaataaaaaaactagagtagaatatcataagttacaatctgtgaatatggaccagaccctttgtagttatcttacagccacttgaactctataccttttactgaggacagaacaagctcctgatttgttcatcttcctcatcagaaatagaggcttatggattttggattattcttatctaagatcctttcacaggagtagaataagatctaattctattagctcaaaagcttttgctggctcatagagacacattcagtaaatgaaaacgttgttctgagtagctttcaggattcctactaaattatgagtcatgtttatcaatattatttagaagtaatcataatcagtttgctttctgctgcttttgccaaagagaggtgattatgttactttttatagaaaattatgcctatttagtgtggtgataatttatttttttccattctccatgtcctctgtcctatcctctccagcattagaaagtcctaggcaagagacatcttgtggataatgtatcaatgagtgatgtttaacgttatcattttcccaaagagtatttttcatctttcctaaagattttttttttttttttttgagatggagtttcattctgtcacccaggctgagtgcagtggcacgatctcggcttaacgcttactgcatcctctgcctcccagattcaagcagttctcctgcctcagcctctgagtagctgggattacaggtgtgcaccaccacaccagctaatttttttttttttttttttttttttgaggcagagtctcgctctgtcacccaggctggagtgcagtggcgccatcttggctcactgcaagctccacctcccgggttcaggccgttctcctgcctcagcctcctgagtagctggtaccacaggcacccaccatcatgcccggctaattttttgtatttttagtagagatggggtttcaccttgttagccaggatggtgtcgatctcctgaactcgtgatccacccgcctcggcctcctaaagtgctgggattacagatgtgagccaccgcacctggccccagttgtaattgtgaatatctcatacctatccctattggcagtgtcttagttttattttttattatctttattgtggcagccattattcctgtctctatctccagtcttacatcctccttactgccacaagaatgatcattctaaacatgaatcctaccctgtgactcccatgtgactccccgccttaaaaactgtcaaaagctaccggttacctgaagggtaaaagtcaagtcccctacttacctcatgtcatctagagcaagagatgaactagctgagttttctgaccacagtgttctttcttatgtatgttcttttgtacgtgctcttttctatatatagggaaccatttctctcttccagttgttttgctcagtgaatttctattcctgtttcaaaacttgttcaggcattaccttttttttcttaagcatactttttttaatggaacaaagtcactcctgtctacactagttctgcatcttatacataggttttgtacatagtacatatttatatcacatcaaattatatgtgtttacatatctgtcttccttaatggaatataagtcttttgatataaggaactatttaatttgtttctgtgtgttgagtatctcctgtttggcacagagttcaagctaatacatgagagtgattagtggtggagagccacagtgcatgtggtgtcaaatatggtgcttaggaaattattgttgctttttgagaggtaaaggttcatgagactagaggtcacgaaaatcagatttcatgtgtgaagaatggaatagatgtattatatatggaggaaattctaattttgtaaaaaactggattgtgagttttaaggagatgttatataaagttaagacaatgtcattttgtggtattggtctgaattacaatgtagtttcttagtgatatttttcctttattcagtgcagtgcttcagccgctaccccgaccacatgaagcagcacgacttcttcaagtccgccatgcccgaaggctacgtccaggagcgcaccatcttcttcaaggacgacggcaactacaagacccgcgccgaggtgaagttcgagggcgacaccctggtgaaccgcatcgagctgaagggcatcgacttcaaggaggacggcaacatcctggggcacaagctggagtacaactacaacagccacaacgtctatatcatggccgacaagcagaagaacggcatcaaggtgaacttcaagatccgccacaacatcgaggacggcagcgtgcagctcgccgaccactaccagcagaacacccccatcggcgacggccccgtgctgctgcccgacaaccactacctgagcacccagtccgccctgagcaaagaccccaacgagaagcgcgatcacatggtcctgctggagttcgtgaccgccgccgggatcactctcggcatggacgagctgtacaagtcgagctagcaataaaggatcgtttattttcattggaagcgtgtgttggttttttgatcaggcgcgtccaagcttgcatgctggggagagatctgcggccgctcgagtggctccggtgcccgtcagtgggcagagcgcacatcgcccacagtccccgagaagttggggggaggggtcggcaattgaaccggtgcctagagaaggtggcgcggggtaaactgggaaagtgatgtcgtgtactggctccgcctttttcccgagggtgggggagaaccgtatataagtgcagtagtcgccgtgaacgttctttttcgcaacgggtttgccgccagaacacaggtgtcgtgaccgcgggcggccgccgctagcgctaccggtcgccaccatggtgagcaagggcgaggaggataacatggccatcatcaaggagttcatgcgcttcaaggtgcacatggagggctccgtgaacggccacgagttcgagatcgagggcgagggcgagggccgcccctacgagggcacccagaccgccaagctgaaggtgaccaagggtggccccctgcccttcgcctgggacatcctgtcccctcagttcatgtacggctccaaggcctacgtgaagcaccccgccgacatccccgactacttgaagctgtccttccccgagggcttcaagtgggagcgcgtgatgaacttcgaggacggcggcgtggtgaccgtgacccaggactcctccctgcaggacggcgagttcatctacaaggtgaagctgcgcggcaccaacttcccctccgacggccccgtaatgcagaagaagaccatgggctgggaggcctcctccgagcggatgtaccccgaggacggcgccctgaagggcgagatcaagcagaggctgaagctgaaggacggcggccactacgacgctgaggtcaagaccacctacaaggccaagaagcccgtgcagctgcccggcgcctacaacgtcaacatcaagttggacatcacctcccacaacgaggactacaccatcgtggaacagtacgaacgcgccgagggccgccactccaccggcggcatggacgagctgtacaagtgaccggtcatcatcaccatcaccattgagtttaaacccgctgatcagcctcgactgtgccttctagttgccagccatctgttgtttgcccctcccccgtgccttccttgaccctggaaggtgccactcccactgtcctttcctaataaaatgaggaaattgcatcgcattgtctgagtaggtgtcattctattctggggggtggggtggggcaggacagcaa

SEQ ID NO: 2799 - DNA, 5120 bp, synthetic construct
  misc_feature 1..5120: note = pAD27/SplitGFP+Mutant/CEP290/Kan
  source 1..5120: mol_type = other DNA
acataacttacggtaaatggcccgcctggctgaccgcccaacgacccccgcccattgacgtcaataatgacgtatgttcccatagtaacgccaatagggactttccattgacgtcaatgggtggactatttacggtaaactgcccacttggcagtacatcaagtgtatcatatgccaagtacgccccctattgacgtcaatgacggtaaatggcccgcctggcattatgcccagtacatgaccttatgggactttcctacttggcagtacatctacgtattagtcatcgctattaccatggtgatgcggttttggcagtacatcaatgggcgtggatagcggtttgactcacggggatttccaagtctccaccccattgacgtcaatgggagtttgttttggcaccaaaatcaacgggactttccaaaatgtcgtaacaactccgccccattgacgcaaatgggcggtaggcgtgtacggtgggaggtctatataagcagagctggtttagtgaaccgtcagatccgctagagatccgcggccgctaatacgactcactatagggagagccgccaccatggtgagcaagggcgaggagctgttcaccggggtggtgcccatcctggtcgagctggacggcgacgtaaacggccacaagttcagcgtgtccggcgagggcgagggcgatgccacctacggcaagctgaccctgaagttcatctgcaccaccggcaagctgcccgtgccctggcccaccctcgtgaccaccctgacctacggaggtaagtttgtgtgattcttgaaccttgtgaaattagccatttttcttcaatatttttgtgtttggggggatttggcagattttaattaaagtttgcctgcatttatataaatttaacagagatataattatccatattattcattgtggctgaatgacttctgaatgattatctagatcattctccttaggtcacttgcatgatttagctgaatcaaacctcttttaaccagacatctaagagaaaaaggagcatgaaacaggtagaatattgtaatcaaaggagggaagcactcattaagtgcccatccctttctcttacccctgtacccagaacaaactattctcccatggtccctggcttttgttccttggaatggatgtagccaacagtagctgaaatattaagggctcttcctggaccatggatgcactctgtaaattctcatcattttttattgtagaataaatgtagaattttaatgtagaataaatttatttaatgtagaataaaaaataaaaaaactagagtagaatatcataagttacaatctgtgaatatggaccagaccctttgtagttatcttacagccacttgaactctataccttttactgaggacagaacaagctcctgatttgttcatcttcctcatcagaaatagaggcttatggattttggattattcttatctaagatcctttcacaggagtagaataagatctaattctattagctcaaaagcttttgctggctcatagagacacattcagtaaatgaaaacgttgttctgagtagctttcaggattcctactaaattatgagtcatgtttatcaatattatttagaagtaatcataatcagtttgctttctgctgcttttgccaaagagaggtgattatgttactttttatagaaaattatgcctatttagtgtggtgataatttatttttttccattctccatgtcctctgtcctatcctctccagcattagaaagtcctaggcaagagacatcttgtggataatgtatcaatgagtgatgtttaacgttatcattttcccaaagagtatttttcatctttcctaaagattttttttttttttttttgagatggagtttcattctgtcacccaggctgagtgcagtggcacgatctcggcttaacgcttactgcatcctctgcctcccagattcaagcagttctcctgcctcagcctctgagtagctgggattacaggtgtgcaccaccacaccagctaatttttttttttttttttttttttttgaggcagagtctcgctctgtcacccaggctggagtgcagtggcgccatcttggctcactgcaagctccacctcccgggttcaggccgttctcctgcctcagcctcctgagtagctggtaccacaggcacccaccatcatgcccggctaattttttgtatttttagtagagatggggtttcaccttgttagccaggatggtgtcgatctcctgaactcgtgatccacccgcctcggcctcctaaagtgctgggattacagatgtgagccaccgcacctggccccagttgtaattgtgagtatctcatacctatccctattggcagtgtcttagttttattttttattatctttattgtggcagccattattcctgtctctatctccagtcttacatcctccttactgccacaagaatgatcattctaaacatgaatcctaccctgtgactcccatgtgactccccgccttaaaaactgtcaaaagctaccggttacctgaagggtaaaagtcaagtcccctacttacctcatgtcatctaaagcaagagatgaactagctgagttttctgaccacagtgttctttcttatgtatgttcttttgtacgtgctcttttctatatatagggaaccatttctctcttccagttgttttgctcagtgaatttctattcctgtttcaaaacttgttcaggcattaccttttttttcttaagcatactttttttaatggaacaaagtcactcctgtctacactagttctgcatcttatacataggttttgtacatagtacatatttatatcacatcaaattatatgtgtttacatatctgtcttccttaatggaatataagtcttttgatataaggaactatttaatttgtttctgtgtgttgagtatctcctgtttggcacagagttcaagctaatacatgagagtgattagtggtggagagccacagtgcatgtggtgtcaaatatggtgcttaggaaattattgttgctttttgagaggtaaaggttcatgagactagaggtcacgaaaatcagatttcatgtgtgaagaatggaatagatgtattatatatggaggaaattctaattttgtaaaaaactggattgtgagttttaaggagatgttatataaagttaagacaatgtcattttgtggtattggtctgaattacaatgtagtttcttagtgatatttttcctttattcagtgcagtgcttcagccgctaccccgaccacatgaagcagcacgacttcttcaagtccgccatgcccgaaggctacgtccaggagcgcaccatcttcttcaaggacgacggcaactacaagacccgcgccgaggtgaagttcgagggcgacaccctggtgaaccgcatcgagctgaagggcatcgacttcaaggaggacggcaacatcctggggcacaagctggagtacaactacaacagccacaacgtctatatcatggccgacaagcagaagaacggcatcaaggtgaacttcaagatccgccacaacatcgaggacggcagcgtgcagctcgccgaccactaccagcagaacacccccatcggcgacggccccgtgctgctgcccgacaaccactacctgagcacccagtccgccctgagcaaagaccccaacgagaagcgcgatcacatggtcctgctggagttcgtgaccgccgccgggatcactctcggcatggacgagctgtacaagtcgagctagcaataaaggatcgtttattttcattggaagcgtgtgttggttttttgatcaggcgcgtccaagcttgcatgctggggagagatctgcggccgctcgagtggctccggtgcccgtcagtgggcagagcgcacatcgcccacagtccccgagaagttggggggaggggtcggcaattgaaccggtgcctagagaaggtggcgcggggtaaactgggaaagtgatgtcgtgtactggctccgcctttttcccgagggtgggggagaaccgtatataagtgcagtagtcgccgtgaacgttctttttcgcaacgggtttgccgccagaacacaggtgtcgtgaccgcgggcggccgccgctagcgctaccggtcgccaccatggtgagcaagggcgaggaggataacatggccatcatcaaggagttcatgcgcttcaaggtgcacatggagggctccgtgaacggccacgagttcgagatcgagggcgagggcgagggccgcccctacgagggcacccagaccgccaagctgaaggtgaccaagggtggccccctgcccttcgcctgggacatcctgtcccctcagttcatgtacggctccaaggcctacgtgaagcaccccgccgacatccccgactacttgaagctgtccttccccgagggcttcaagtgggagcgcgtgatgaacttcgaggacggcggcgtggtgaccgtgacccaggactcctccctgcaggacggcgagttcatctacaaggtgaagctgcgcggcaccaacttcccctccgacggccccgtaatgcagaagaagaccatgggctgggaggcctcctccgagcggatgtaccccgaggacggcgccctgaagggcgagatcaagcagaggctgaagctgaaggacggcggccactacgacgctgaggtcaagaccacctacaaggccaagaagcccgtgcagctgcccggcgcctacaacgtcaacatcaagttggacatcacctcccacaacgaggactacaccatcgtggaacagtacgaacgcgccgagggccgccactccaccggcggcatggacgagctgtacaagtgaccggtcatcatcaccatcaccattgagtttaaacccgctgatcagcctcgactgtgccttctagttgccagccatctgttgtttgcccctcccccgtgccttccttgaccctggaaggtgccactcccactgtcctttcctaataaaatgaggaaattgcatcgcattgtctgagtaggtgtcattctattctggggggtggggtggggcaggacagcaa

SEQ ID NO: 2800 - DNA, 5120 bp, synthetic construct
  misc_feature 1..5120: note = pAD28/SplitGFP+Mutant/CEP290/Inverted/Kan
  source 1..5120: mol_type = other DNA
acataacttacggtaaatggcccgcctggctgaccgcccaacgacccccgcccattgacgtcaataatgacgtatgttcccatagtaacgccaatagggactttccattgacgtcaatgggtggactatttacggtaaactgcccacttggcagtacatcaagtgtatcatatgccaagtacgccccctattgacgtcaatgacggtaaatggcccgcctggcattatgcccagtacatgaccttatgggactttcctacttggcagtacatctacgtattagtcatcgctattaccatggtgatgcggttttggcagtacatcaatgggcgtggatagcggtttgactcacggggatttccaagtctccaccccattgacgtcaatgggagtttgttttggcaccaaaatcaacgggactttccaaaatgtcgtaacaactccgccccattgacgcaaatgggcggtaggcgtgtacggtgggaggtctatataagcagagctggtttagtgaaccgtcagatccgctagagatccgcggccgctaatacgactcactatagggagagccgccaccatggtgagcaagggcgaggagctgttcaccggggtggtgcccatcctggtcgagctggacggcgacgtaaacggccacaagttcagcgtgtccggcgagggcgagggcgatgccacctacggcaagctgaccctgaagttcatctgcaccaccggcaagctgcccgtgccctggcccaccctcgtgaccaccctgacctacggaggtaagtttgtgtgattcttgaaccttgtgaaattagccatttttcttcaatatttttgtgtttggggggatttggcagattttaattaaagtttgcctgcatttatataaatttaacagagatataattatccatattattcattgtggctgaatgacttctgaatgattatctagatcattctccttaggtcacttgcatgatttagctgaatcaaacctcttttaaccagacatctaagagaaaaaggagcatgaaacaggtagaatattgtaatcaaaggagggaagcactcattaagtgcccatccctttctcttacccctgtacccagaacaaactattctcccatggtccctggcttttgttccttggaatggatgtagccaacagtagctgaaatattaagggctcttcctggaccatggatgcactctgtaaattctcatcattttttattgtagaataaatgtagaattttaatgtagaataaatttatttaatgtagaataaaaaataaaaaaactagagtagaatatcataagttacaatctgtgaatatggaccagaccctttgtagttatcttacagccacttgaactctatacgtaaccggtagcttttgacagtttttaaggcggggagtcacatgggagtcacagggtaggattcatgtttagaatgatcattcttgtggcagtaaggaggatgtaagactggagatagagacaggaataatggctgccacaataaagataataaaaaataaaactaagacactgccaatagggataggtatgagatactcacaattacaactggggccaggtgcggtggctcacatctgtaatcccagcactttaggaggccgaggcgggtggatcacgagttcaggagatcgacaccatcctggctaacaaggtgaaaccccatctctactaaaaatacaaaaaattagccgggcatgatggtgggtgcctgtggtaccagctactcaggaggctgaggcaggagaacggcctgaacccgggaggtggagcttgcagtgagccaagatggcgccactgcactccagcctgggtgacagagcgagactctgcctcaaaaaaaaaaaaaaaaaaaaaaaaattagctggtgtggtggtgcacacctgtaatcccagctactcagaggctgaggcaggagaactgcttgaatctgggaggcagaggatgcagtaagcgttaagccgagatcgtgccactgcactcagcctgggtgacagaatgaaactccatctcaaaaaaaaaaaaaaaaaatctttaggaaagatgaaaaatactctttgggaaaatgataacgttaaacatcactcattgatacattatccacaagatgtctcttgcctaggactttctaatgctggagaggataggacagaggacatggagaatggaaaaaaataaattatcaccacactaaataggcataattttctataaaaagtaacataatcacctctctttggcaaaagcagcagaaagcaaactgattatgattacttctaaataatattgataaacatgactcataatttagtaggaatcctgaaagctactcagaacaacgttttcatttactgaatgtgtctctatgagccagcaaaagcttttgagctaatagaattagatcttattctactcctgtgaaaggatcttagataagaataatccaaaatccataagcctctatttctgatgaggaagatgaacaaatcaggagcttgttctgtcctcagtaaaagctgaagggtaaaagtcaagtcccctacttacctcatgtcatctaaagcaagagatgaactagctgagttttctgaccacagtgttctttcttatgtatgttcttttgtacgtgctcttttctatatatagggaaccatttctctcttccagttgttttgctcagtgaatttctattcctgtttcaaaacttgttcaggcattaccttttttttcttaagcatactttttttaatggaacaaagtcactcctgtctacactagttctgcatcttatacataggttttgtacatagtacatatttatatcacatcaaattatatgtgtttacatatctgtcttccttaatggaatataagtcttttgatataaggaactatttaatttgtttctgtgtgttgagtatctcctgtttggcacagagttcaagctaatacatgagagtgattagtggtggagagccacagtgcatgtggtgtcaaatatggtgcttaggaaattattgttgctttttgagaggtaaaggttcatgagactagaggtcacgaaaatcagatttcatgtgtgaagaatggaatagatgtattatatatggaggaaattctaattttgtaaaaaactggattgtgagttttaaggagatgttatataaagttaagacaatgtcattttgtggtattggtctgaattacaatgtagtttcttagtgatatttttcctttattcagtgcagtgcttcagccgctaccccgaccacatgaagcagcacgacttcttcaagtccgccatgcccgaaggctacgtccaggagcgcaccatcttcttcaaggacgacggcaactacaagacccgcgccgaggtgaagttcgagggcgacaccctggtgaaccgcatcgagctgaagggcatcgacttcaaggaggacggcaacatcctggggcacaagctggagtacaactacaacagccacaacgtctatatcatggccgacaagcagaagaacggcatcaaggtgaacttcaagatccgccacaacatcgaggacggcagcgtgcagctcgccgaccactaccagcagaacacccccatcggcgacggccccgtgctgctgcccgacaaccactacctgagcacccagtccgccctgagcaaagaccccaacgagaagcgcgatcacatggtcctgctggagttcgtgaccgccgccgggatcactctcggcatggacgagctgtacaagtcgagctagcaataaaggatcgtttattttcattggaagcgtgtgttggttttttgatcaggcgcgtccaagcttgcatgctggggagagatctgcggccgctcgagtggctccggtgcccgtcagtgggcagagcgcacatcgcccacagtccccgagaagttggggggaggggtcggcaattgaaccggtgcctagagaaggtggcgcggggtaaactgggaaagtgatgtcgtgtactggctccgcctttttcccgagggtgggggagaaccgtatataagtgcagtagtcgccgtgaacgttctttttcgcaacgggtttgccgccagaacacaggtgtcgtgaccgcgggcggccgccgctagcgctaccggtcgccaccatggtgagcaagggcgaggaggataacatggccatcatcaaggagttcatgcgcttcaaggtgcacatggagggctccgtgaacggccacgagttcgagatcgagggcgagggcgagggccgcccctacgagggcacccagaccgccaagctgaaggtgaccaagggtggccccctgcccttcgcctgggacatcctgtcccctcagttcatgtacggctccaaggcctacgtgaagcaccccgccgacatccccgactacttgaagctgtccttccccgagggcttcaagtgggagcgcgtgatgaacttcgaggacggcggcgtggtgaccgtgacccaggactcctccctgcaggacggcgagttcatctacaaggtgaagctgcgcggcaccaacttcccctccgacggccccgtaatgcagaagaagaccatgggctgggaggcctcctccgagcggatgtaccccgaggacggcgccctgaagggcgagatcaagcagaggctgaagctgaaggacggcggccactacgacgctgaggtcaagaccacctacaaggccaagaagcccgtgcagctgcccggcgcctacaacgtcaacatcaagttggacatcacctcccacaacgaggactacaccatcgtggaacagtacgaacgcgccgagggccgccactccaccggcggcatggacgagctgtacaagtgaccggtcatcatcaccatcaccattgagtttaaacccgctgatcagcctcgactgtgccttctagttgccagccatctgttgtttgcccctcccccgtgccttccttgaccctggaaggtgccactcccactgtcctttcctaataaaatgaggaaattgcatcgcattgtctgagtaggtgtcattctattctggggggtggggtggggcaggacagcaa

SEQ ID NO: 2801 - DNA, 3944 bp, synthetic construct
  misc_feature 1..3944: note = pAD29/SplitGFP+Deletion/CEP290/Kan
  source 1..3944: mol_type = other DNA
acataacttacggtaaatggcccgcctggctgaccgcccaacgacccccgcccattgacgtcaataatgacgtatgttcccatagtaacgccaatagggactttccattgacgtcaatgggtggactatttacggtaaactgcccacttggcagtacatcaagtgtatcatatgccaagtacgccccctattgacgtcaatgacggtaaatggcccgcctggcattatgcccagtacatgaccttatgggactttcctacttggcagtacatctacgtattagtcatcgctattaccatggtgatgcggttttggcagtacatcaatgggcgtggatagcggtttgactcacggggatttccaagtctccaccccattgacgtcaatgggagtttgttttggcaccaaaatcaacgggactttccaaaatgtcgtaacaactccgccccattgacgcaaatgggcggtaggcgtgtacggtgggaggtctatataagcagagctggtttagtgaaccgtcagatccgctagagatccgcggccgctaatacgactcactatagggagagccgccaccatggtgagcaagggcgaggagctgttcaccggggtggtgcccatcctggtcgagctggacggcgacgtaaacggccacaagttcagcgtgtccggcgagggcgagggcgatgccacctacggcaagctgaccctgaagttcatctgcaccaccggcaagctgcccgtgccctggcccaccctcgtgaccaccctgacctacggaggtaagtttgtgtgattcttgaaccttgtgaaattagccatttttcttcaatatttttgtgtttggggggatttggcagattttaattaaagtttgcctgcatttatataaatttaacagagatataattatccatattattcattgtggctgaatgacttctgaatgattatctagatcattctccttaggtcacttgcatgatttagctgaatcaaacctcttttaaccagacatctaagagaaaaaggagcatgaaacaggtagaatattgtaatcaaaggagggaagcactcattaagtgcccatccctttctcttacccctgtacccagaacaaactattctcccatggtccctggcttttgttccttggaatggatgtagccaacagtagctgaaatattaagggctcttcctggaccatggatgcactctgtaaattctcatcattttttattgtagaataaatgtagaattttaatgtagaataaatttatttaatgtagaataaaaaataaaaaaactagagtagaatatcataagttacaatctgtgaatatggaccagaccctttgtagttatcttacagccacttgaactctatacctgaagggtaaaagtcaagtcccctacttacctcatgtcatctaaagcaagagatgaactagctgagttttctgaccacagtgttctttcttatgtatgttcttttgtacgtgctcttttctatatatagggaaccatttctctcttccagttgttttgctcagtgaatttctattcctgtttcaaaacttgttcaggcattaccttttttttcttaagcatactttttttaatggaacaaagtcactcctgtctacactagttctgcatcttatacataggttttgtacatagtacatatttatatcacatcaaattatatgtgtttacatatctgtcttccttaatggaatataagtcttttgatataaggaactatttaatttgtttctgtgtgttgagtatctcctgtttggcacagagttcaagctaatacatgagagtgattagtggtggagagccacagtgcatgtggtgtcaaatatggtgcttaggaaattattgttgctttttgagaggtaaaggttcatgagactagaggtcacgaaaatcagatttcatgtgtgaagaatggaatagatgtattatatatggaggaaattctaattttgtaaaaaactggattgtgagttttaaggagatgttatataaagttaagacaatgtcattttgtggtattggtctgaattacaatgtagtttcttagtgatatttttcctttattcagtgcagtgcttcagccgctaccccgaccacatgaagcagcacgacttcttcaagtccgccatgcccgaaggctacgtccaggagcgcaccatcttcttcaaggacgacggcaactacaagacccgcgccgaggtgaagttcgagggcgacaccctggtgaaccgcatcgagctgaagggcatcgacttcaaggaggacggcaacatcctggggcacaagctggagtacaactacaacagccacaacgtctatatcatggccgacaagcagaagaacggcatcaaggtgaacttcaagatccgccacaacatcgaggacggcagcgtgcagctcgccgaccactaccagcagaacacccccatcggcgacggccccgtgctgctgcccgacaaccactacctgagcacccagtccgccctgagcaaagaccccaacgagaagcgcgatcacatggtcctgctggagttcgtgaccgccgccgggatcactctcggcatggacgagctgtacaagtcgagctagcaataaaggatcgtttattttcattggaagcgtgtgttggttttttgatcaggcgcgtccaagcttgcatgctggggagagatctgcggccgctcgagtggctccggtgcccgtcagtgggcagagcgcacatcgcccacagtccccgagaagttggggggaggggtcggcaattgaaccggtgcctagagaaggtggcgcggggtaaactgggaaagtgatgtcgtgtactggctccgcctttttcccgagggtgggggagaaccgtatataagtgcagtagtcgccgtgaacgttctttttcgcaacgggtttgccgccagaacacaggtgtcgtgaccgcgggcggccgccgctagcgctaccggtcgccaccatggtgagcaagggcgaggaggataacatggccatcatcaaggagttcatgcgcttcaaggtgcacatggagggctccgtgaacggccacgagttcgagatcgagggcgagggcgagggccgcccctacgagggcacccagaccgccaagctgaaggtgaccaagggtggccccctgcccttcgcctgggacatcctgtcccctcagttcatgtacggctccaaggcctacgtgaagcaccccgccgacatccccgactacttgaagctgtccttccccgagggcttcaagtgggagcgcgtgatgaacttcgaggacggcggcgtggtgaccgtgacccaggactcctccctgcaggacggcgagttcatctacaaggtgaagctgcgcggcaccaacttcccctccgacggccccgtaatgcagaagaagaccatgggctgggaggcctcctccgagcggatgtaccccgaggacggcgccctgaagggcgagatcaagcagaggctgaagctgaaggacggcggccactacgacgctgaggtcaagaccacctacaaggccaagaagcccgtgcagctgcccggcgcctacaacgtcaacatcaagttggacatcacctcccacaacgaggactacaccatcgtggaacagtacgaacgcgccgagggccgccactccaccggcggcatggacgagctgtacaagtgaccggtcatcatcaccatcaccattgagtttaaacccgctgatcagcctcgactgtgccttctagttgccagccatctgttgtttgcccctcccccgtgccttccttgaccctggaaggtgccactcccactgtcctttcctaataaaatgaggaaattgcatcgcattgtctgagtaggtgtcattctattctggggggtggggtggggcaggacagcaa

SEQ ID NO: 2802 - DNA, 4608 bp, synthetic construct
  misc_feature 1..4608: note = Transgene
  misc_feature 16..34: note = Spacer (exemplary spacer 1 sequence of SEQ ID NO:416)
  misc_feature 35..298: note = U6 promoter (SEQ ID NO:417)
  misc_feature 423..686: note = U6 promoter (SEQ ID NO:417)
  misc_difference 687..790: note = S. aureus gRNA w/ targeting domain of CEP290-64
  misc_feature 817..1108: note = hGRK1 promoter
  misc_feature 1109..1272: note = SV40 splice donor (SD)/splice acceptor (SA) site
  misc_feature 1276..1288: note = Consensus Kozak sequence
  misc_feature 1291..1311: note = SV40 nuclear localization signal (NLS)
  misc_feature 1321..4479: note = Codon-optimized S. aures Cas9 (SEQ ID NO:39)
  misc_feature 4486..4506: note = SV40 nuclear localization signal (NLS) (SEQ ID NO:422)
  misc_feature 4513..4572: note = Mini polyA (SEQ ID NO:424)
  source 1..4608: mol_type = other DNA
  misc_difference 299..402: note = S. aureus gRNA w/ targeting domain of CEP290-323
gcggccgcggttcctcagatctgaattcggtaccaaggtcgggcaggaagagggcctatttcccatgattccttcatatttgcatatacgatacaaggctgttagagagataattagaattaatttgactgtaaacacaaagatattagtacaaaatacgtgacgtagaaagtaataatttcttgggtagtttgcagttttaaaattatgttttaaaatggactatcatatgcttaccgtaacttgaaagtatttcgatttcttggctttatatatcttgtggaaaggacgaaacaccgttctgtcctcagtaaaaggtagttatagtactctggaaacagaatctactataacaaggcaaaatgccgtgtttatctcgtcaacttgttggcgagattttttcgacttagttcgatcgaaggaaggtcgggcaggaagagggcctatttcccatgattccttcatatttgcatatacgatacaaggctgttagagagataattagaattaatttgactgtaaacacaaagatattagtacaaaatacgtgacgtagaaagtaataatttcttgggtagtttgcagttttaaaattatgttttaaaatggactatcatatgcttaccgtaacttgaaagtatttcgatttcttggctttatatatcttgtggaaaggacgaaacaccgtcaaaagctaccggttacctggttatagtactctggaaacagaatctactataacaaggcaaaatgccgtgtttatctcgtcaacttgttggcgagattttttggtaccgctagcgcttaagtcgcgaagggccccagaagcctggtggttgtttgtccttctcaggggaaaagtgaggcggccccttggaggaaggggccgggcagaatgatctaatcggattccaagcagctcaggggattgtctttttctagcaccttcttgccactcctaagcgtcctccgtgaccccggctgggatttagcctggtgctgtgtcagccccggtctcccaggggcttcccagtggtccccaggaaccctcgacagggcccggtctctctcgtccagcaagggcagggacgggccacaggccaagggctctagaggatccggtactcgaggaactgaaaaaccagaaagttaactggtaagtttagtctttttgtcttttatttcaggtcccggatccggtggtggtgcaaatcaaagaactgctcctcagtggatgttgcctttacttctaggcctgtacggaagtgttacgcggccgccaccatgggaccgaagaaaaagcgcaaggtcgaagcgtccatgaaaaggaactacattctggggctggacatcgggattacaagcgtggggtatgggattattgactatgaaacaagggacgtgatcgacgcaggcgtcagactgttcaaggaggccaacgtggaaaacaatgagggacggagaagcaagaggggagccaggcgcctgaaacgacggagaaggcacagaatccagagggtgaagaaactgctgttcgattacaacctgctgaccgaccattctgagctgagtggaattaatccttatgaagccagggtgaaaggcctgagtcagaagctgtcagaggaagagttttccgcagctctgctgcacctggctaagcgccgaggagtgcataacgtcaatgaggtggaagaggacaccggcaacgagctgtctacaaaggaacagatctcacgcaatagcaaagctctggaagagaagtatgtcgcagagctgcagctggaacggctgaagaaagatggcgaggtgagagggtcaattaataggttcaagacaagcgactacgtcaaagaagccaagcagctgctgaaagtgcagaaggcttaccaccagctggatcagagcttcatcgatacttatatcgacctgctggagactcggagaacctactatgagggaccaggagaagggagccccttcggatggaaagacatcaaggaatggtacgagatgctgatgggacattgcacctattttccagaagagctgagaagcgtcaagtacgcttataacgcagatctgtacaacgccctgaatgacctgaacaacctggtcatcaccagggatgaaaacgagaaactggaatactatgagaagttccagatcatcgaaaacgtgtttaagcagaagaaaaagcctacactgaaacagattgctaaggagatcctggtcaacgaagaggacatcaagggctaccgggtgacaagcactggaaaaccagagttcaccaatctgaaagtgtatcacgatattaaggacatcacagcacggaaagaaatcattgagaacgccgaactgctggatcagattgctaagatcctgactatctaccagagctccgaggacatccaggaagagctgactaacctgaacagcgagctgacccaggaagagatcgaacagattagtaatctgaaggggtacaccggaacacacaacctgtccctgaaagctatcaatctgattctggatgagctgtggcatacaaacgacaatcagattgcaatctttaaccggctgaagctggtcccaaaaaaggtggacctgagtcagcagaaagagatcccaaccacactggtggacgatttcattctgtcacccgtggtcaagcggagcttcatccagagcatcaaagtgatcaacgccatcatcaagaagtacggcctgcccaatgatatcattatcgagctggctagggagaagaacagcaaggacgcacagaagatgatcaatgagatgcagaaacgaaaccggcagaccaatgaacgcattgaagagattatccgaactaccgggaaagagaacgcaaagtacctgattgaaaaaatcaagctgcacgatatgcaggagggaaagtgtctgtattctctggaggccatccccctggaggacctgctgaacaatccattcaactacgaggtcgatcatattatccccagaagcgtgtccttcgacaattcctttaacaacaaggtgctggtcaagcaggaagagaactctaaaaagggcaataggactcctttccagtacctgtctagttcagattccaagatctcttacgaaacctttaaaaagcacattctgaatctggccaaaggaaagggccgcatcagcaagaccaaaaaggagtacctgctggaagagcgggacatcaacagattctccgtccagaaggattttattaaccggaatctggtggacacaagatacgctactcgcggcctgatgaatctgctgcgatcctatttccgggtgaacaatctggatgtgaaagtcaagtccatcaacggcgggttcacatcttttctgaggcgcaaatggaagtttaaaaaggagcgcaacaaagggtacaagcaccatgccgaagatgctctgattatcgcaaatgccgacttcatctttaaggagtggaaaaagctggacaaagccaagaaagtgatggagaaccagatgttcgaagagaagcaggccgaatctatgcccgaaatcgagacagaacaggagtacaaggagattttcatcactcctcaccagatcaagcatatcaaggatttcaaggactacaagtactctcaccgggtggataaaaagcccaacagagagctgatcaatgacaccctgtatagtacaagaaaagacgataaggggaataccctgattgtgaacaatctgaacggactgtacgacaaagataatgacaagctgaaaaagctgatcaacaaaagtcccgagaagctgctgatgtaccaccatgatcctcagacatatcagaaactgaagctgattatggagcagtacggcgacgagaagaacccactgtataagtactatgaagagactgggaactacctgaccaagtatagcaaaaaggataatggccccgtgatcaagaagatcaagtactatgggaacaagctgaatgcccatctggacatcacagacgattaccctaacagtcgcaacaaggtggtcaagctgtcactgaagccatacagattcgatgtctatctggacaacggcgtgtataaatttgtgactgtcaagaatctggatgtcatcaaaaaggagaactactatgaagtgaatagcaagtgctacgaagaggctaaaaagctgaaaaagattagcaaccaggcagagttcatcgcctccttttacaacaacgacctgattaagatcaatggcgaactgtatagggtcatcggggtgaacaatgatctgctgaaccgcattgaagtgaatatgattgacatcacttaccgagagtatctggaaaacatgaatgataagcgcccccctcgaattatcaaaacaattgcctctaagactcagagtatcaaaaagtactcaaccgacattctgggaaacctgtatgaggtgaagagcaaaaagcaccctcagattatcaaaaagggcggatcccccaagaagaagaggaaagtctcgagctagcaataaaggatcgtttattttcattggaagcgtgtgttggttttttgatcaggcgcgtccaagcttgcatgctggggagagatctgcggccgc

SEQ ID NO: 2803 - DNA, 4890 bp, synthetic construct
  misc_feature 1..4890: note = Transgene w/ AAV2 ITRs
  misc_feature 1..141: note = AAV2 Inverted Terminal Repeat (ITR)
  misc_feature 157..175: note = Spacer (exemplary spacer 1 sequence of SEQ ID NO:416)
  misc_feature 176..439: note = U6 promoter (SEQ ID NO:417)
  misc_feature 564..827: note = U6 promoter (SEQ ID NO:417)
  misc_feature 958..1249: note = hGRK1 promoter
  misc_feature 1250..1413: note = SV40 splice donor (SD)/splice acceptor (SA) site
  misc_feature 1417..1429: note = Consensus Kozak sequence
  misc_feature 1432..1452: note = SV40 nuclear localization signal (NLS)
  misc_feature 1462..4620: note = Codon-optimized S. aures Cas9 (SEQ ID NO:39)
  misc_feature 4627..4647: note = SV40 nuclear localization signal (NLS) (SEQ ID NO:422)
  misc_feature 4654..4713: note = Mini polyA (SEQ ID NO:424)
  misc_feature 4750..4890: note = AAV2 Inverted Terminal Repeat (ITR)
  source 1..4890: mol_type = other DNA
  misc_difference 828..931: note = S. aureus gRNA w/ targeting domain of CEP290-64
  misc_difference 440..543: note = S. aureus gRNA w/ targeting domain of CEP290-323
cctgcaggcagctgcgcgctcgctcgctcactgaggccgcccgggcaaagcccgggcgtcgggcgacctttggtcgcccggcctcagtgagcgagcgagcgcgcagagagggagtggccaactccatcactaggggttcctgcggccgcggttcctcagatctgaattcggtaccaaggtcgggcaggaagagggcctatttcccatgattccttcatatttgcatatacgatacaaggctgttagagagataattagaattaatttgactgtaaacacaaagatattagtacaaaatacgtgacgtagaaagtaataatttcttgggtagtttgcagttttaaaattatgttttaaaatggactatcatatgcttaccgtaacttgaaagtatttcgatttcttggctttatatatcttgtggaaaggacgaaacaccgttctgtcctcagtaaaaggtagttatagtactctggaaacagaatctactataacaaggcaaaatgccgtgtttatctcgtcaacttgttggcgagattttttcgacttagttcgatcgaaggaaggtcgggcaggaagagggcctatttcccatgattccttcatatttgcatatacgatacaaggctgttagagagataattagaattaatttgactgtaaacacaaagatattagtacaaaatacgtgacgtagaaagtaataatttcttgggtagtttgcagttttaaaattatgttttaaaatggactatcatatgcttaccgtaacttgaaagtatttcgatttcttggctttatatatcttgtggaaaggacgaaacaccgtcaaaagctaccggttacctggttatagtactctggaaacagaatctactataacaaggcaaaatgccgtgtttatctcgtcaacttgttggcgagattttttggtaccgctagcgcttaagtcgcgaagggccccagaagcctggtggttgtttgtccttctcaggggaaaagtgaggcggccccttggaggaaggggccgggcagaatgatctaatcggattccaagcagctcaggggattgtctttttctagcaccttcttgccactcctaagcgtcctccgtgaccccggctgggatttagcctggtgctgtgtcagccccggtctcccaggggcttcccagtggtccccaggaaccctcgacagggcccggtctctctcgtccagcaagggcagggacgggccacaggccaagggctctagaggatccggtactcgaggaactgaaaaaccagaaagttaactggtaagtttagtctttttgtcttttatttcaggtcccggatccggtggtggtgcaaatcaaagaactgctcctcagtggatgttgcctttacttctaggcctgtacggaagtgttacgcggccgccaccatgggaccgaagaaaaagcgcaaggtcgaagcgtccatgaaaaggaactacattctggggctggacatcgggattacaagcgtggggtatgggattattgactatgaaacaagggacgtgatcgacgcaggcgtcagactgttcaaggaggccaacgtggaaaacaatgagggacggagaagcaagaggggagccaggcgcctgaaacgacggagaaggcacagaatccagagggtgaagaaactgctgttcgattacaacctgctgaccgaccattctgagctgagtggaattaatccttatgaagccagggtgaaaggcctgagtcagaagctgtcagaggaagagttttccgcagctctgctgcacctggctaagcgccgaggagtgcataacgtcaatgaggtggaagaggacaccggcaacgagctgtctacaaaggaacagatctcacgcaatagcaaagctctggaagagaagtatgtcgcagagctgcagctggaacggctgaagaaagatggcgaggtgagagggtcaattaataggttcaagacaagcgactacgtcaaagaagccaagcagctgctgaaagtgcagaaggcttaccaccagctggatcagagcttcatcgatacttatatcgacctgctggagactcggagaacctactatgagggaccaggagaagggagccccttcggatggaaagacatcaaggaatggtacgagatgctgatgggacattgcacctattttccagaagagctgagaagcgtcaagtacgcttataacgcagatctgtacaacgccctgaatgacctgaacaacctggtcatcaccagggatgaaaacgagaaactggaatactatgagaagttccagatcatcgaaaacgtgtttaagcagaagaaaaagcctacactgaaacagattgctaaggagatcctggtcaacgaagaggacatcaagggctaccgggtgacaagcactggaaaaccagagttcaccaatctgaaagtgtatcacgatattaaggacatcacagcacggaaagaaatcattgagaacgccgaactgctggatcagattgctaagatcctgactatctaccagagctccgaggacatccaggaagagctgactaacctgaacagcgagctgacccaggaagagatcgaacagattagtaatctgaaggggtacaccggaacacacaacctgtccctgaaagctatcaatctgattctggatgagctgtggcatacaaacgacaatcagattgcaatctttaaccggctgaagctggtcccaaaaaaggtggacctgagtcagcagaaagagatcccaaccacactggtggacgatttcattctgtcacccgtggtcaagcggagcttcatccagagcatcaaagtgatcaacgccatcatcaagaagtacggcctgcccaatgatatcattatcgagctggctagggagaagaacagcaaggacgcacagaagatgatcaatgagatgcagaaacgaaaccggcagaccaatgaacgcattgaagagattatccgaactaccgggaaagagaacgcaaagtacctgattgaaaaaatcaagctgcacgatatgcaggagggaaagtgtctgtattctctggaggccatccccctggaggacctgctgaacaatccattcaactacgaggtcgatcatattatccccagaagcgtgtccttcgacaattcctttaacaacaaggtgctggtcaagcaggaagagaactctaaaaagggcaataggactcctttccagtacctgtctagttcagattccaagatctcttacgaaacctttaaaaagcacattctgaatctggccaaaggaaagggccgcatcagcaagaccaaaaaggagtacctgctggaagagcgggacatcaacagattctccgtccagaaggattttattaaccggaatctggtggacacaagatacgctactcgcggcctgatgaatctgctgcgatcctatttccgggtgaacaatctggatgtgaaagtcaagtccatcaacggcgggttcacatcttttctgaggcgcaaatggaagtttaaaaaggagcgcaacaaagggtacaagcaccatgccgaagatgctctgattatcgcaaatgccgacttcatctttaaggagtggaaaaagctggacaaagccaagaaagtgatggagaaccagatgttcgaagagaagcaggccgaatctatgcccgaaatcgagacagaacaggagtacaaggagattttcatcactcctcaccagatcaagcatatcaaggatttcaaggactacaagtactctcaccgggtggataaaaagcccaacagagagctgatcaatgacaccctgtatagtacaagaaaagacgataaggggaataccctgattgtgaacaatctgaacggactgtacgacaaagataatgacaagctgaaaaagctgatcaacaaaagtcccgagaagctgctgatgtaccaccatgatcctcagacatatcagaaactgaagctgattatggagcagtacggcgacgagaagaacccactgtataagtactatgaagagactgggaactacctgaccaagtatagcaaaaaggataatggccccgtgatcaagaagatcaagtactatgggaacaagctgaatgcccatctggacatcacagacgattaccctaacagtcgcaacaaggtggtcaagctgtcactgaagccatacagattcgatgtctatctggacaacggcgtgtataaatttgtgactgtcaagaatctggatgtcatcaaaaaggagaactactatgaagtgaatagcaagtgctacgaagaggctaaaaagctgaaaaagattagcaaccaggcagagttcatcgcctccttttacaacaacgacctgattaagatcaatggcgaactgtatagggtcatcggggtgaacaatgatctgctgaaccgcattgaagtgaatatgattgacatcacttaccgagagtatctggaaaacatgaatgataagcgcccccctcgaattatcaaaacaattgcctctaagactcagagtatcaaaaagtactcaaccgacattctgggaaacctgtatgaggtgaagagcaaaaagcaccctcagattatcaaaaagggcggatcccccaagaagaagaggaaagtctcgagctagcaataaaggatcgtttattttcattggaagcgtgtgttggttttttgatcaggcgcgtccaagcttgcatgctggggagagatctgcggccgcaggaacccctagtgatggagttggccactccctctctgcgcgctcgctcgctcactgaggccgggcgaccaaaggtcgcccgacgcccgggctttgcccgggcggcctcagtgagcgagcgagcgcgcagctgcctgcagg

SEQ ID NO: 2804 - protein, 1416 aa, Synthetic construct
  VAR_SEQ 1..1416: note = Motif based on S. mutans, S. pyogenes, S. thermophilus, and L. innocua Cas9 sequences
  VAR_SEQ 9..20: note = N-terminal RuvC-like domain
  VAR_SEQ 1199: note = Xaa can be any naturally occurring amino acid
  VAR_SEQ 5: note = Ser or Thr
  VAR_SEQ 23: note = Asp, Glu, Asn, Gln
  VAR_SEQ 26: note = Val or Leu
  VAR_SEQ 29: note = Lys or Arg
  VAR_SEQ 31: note = Met or Phe
  VAR_SEQ 33: note = Val or Ile
  VAR_SEQ 36: note = Asn or Asp
  VAR_SEQ 37: note = Thr or Ser
  VAR_SEQ 39: note = Lys or Arg
  VAR_SEQ 43: note = Lys or Glu
  VAR_SEQ 46: note = Leu or Phe
  VAR_SEQ 63: note = Leu or Met
  VAR_SEQ 75: note = Arg or Lys
  VAR_SEQ 86: note = Ala or Ser
  VAR_SEQ 102: note = Asp or Glu
  VAR_SEQ 108: note = Glu, Asp, or Asn
  VAR_SEQ 109: note = Asp or Glu
  VAR_SEQ 111: note = Arg or Lys
  VAR_SEQ 114: note = Arg or Lys
  VAR_SEQ 115: note = His or Tyr
  VAR_SEQ 117: note = Ile or Phe
  VAR_SEQ 121: note = Leu or Ile
  VAR_SEQ 123: note = Glu or Asp
  VAR_SEQ 130: note = Asn, Lys, or Glu
  VAR_SEQ 131: note = Phe or Tyr
  VAR_SEQ 139: note = Gln, Lys, or Glu
  VAR_SEQ 143: note = Asp or Asn
  VAR_SEQ 153: note = Ile or Val
  VAR_SEQ 160: note = Met or Ile
  VAR_SEQ 163: note = Phe or Tyr
  VAR_SEQ 173: note = Phe or Leu
  VAR_SEQ 174: note = Asp or Asn
  VAR_SEQ 180: note = Val or Ile
  VAR_SEQ 181: note = Gln or Asp
  VAR_SEQ 184: note = Phe or Tyr
  VAR_SEQ 186: note = Glu, Gln, or Asp
  VAR_SEQ 187: note = Leu or Phe
  VAR_SEQ 188: note = Leu, Val, or Ile
  VAR_SEQ 192: note = Asp or Asn
  VAR_SEQ 212: note = Gln or Asp
  VAR_SEQ 217: note = Leu or Val
  VAR_SEQ 220: note = Lys or Arg
  VAR_SEQ 221: note = Ile, Leu, or Val
  VAR_SEQ 222: note = Ser or Thr
  VAR_SEQ 223: note = Lys or Arg
  VAR_SEQ 226: note = Lys or Arg
  VAR_SEQ 228: note = Asp or Glu
  VAR_SEQ 230: note = Val, Ile, or Leu
  VAR_SEQ 231: note = Ile or Leu
  VAR_SEQ 245: note = Glu, Gln, Asn
  VAR_SEQ 246: note = Phe or Leu
  VAR_SEQ 247: note = Leu or Ile
  VAR_SEQ 251: note = Val or Leu
  VAR_SEQ 256: note = Asp or Asn
  VAR_SEQ 258: note = Lys, Arg, or Gln
  VAR_SEQ 262: note = Glu, Asp, Asn
  VAR_SEQ 267: note = Ala or Ser
  VAR_SEQ 269: note = Leu or Ile
  VAR_SEQ 272: note = Ser or Ala
  VAR_SEQ 274: note = Asp or Glu
  VAR_SEQ 275: note = Thr or Ser
  VAR_SEQ 277: note = Asp or Glu
  VAR_SEQ 278: note = Asp or Glu
  VAR_SEQ 279: note = Asp or Glu
  VAR_SEQ 281: note = Asp or Glu
  VAR_SEQ 290: note = Asn, Gln, Asp, or Glu
  VAR_SEQ 292: note = Ala or Ser
  VAR_SEQ 293: note = Asp or Glu
  VAR_SEQ 294: note = Leu or Val
  VAR_SEQ 296: note = Leu or Val
  VAR_SEQ 300: note = Lys or Asn
  VAR_SEQ 304: note = Ser or Ala
  VAR_SEQ 305: note = Ile or Val
  VAR_SEQ 306: note = Leu or Val
  VAR_SEQ 310: note = Ile or Phe
  VAR_SEQ 311: note = Leu or Ile
  VAR_SEQ 319: note = Lys, Glu, or Asn
  VAR_SEQ 324: note = Ala or Ser
  VAR_SEQ 325: note = Ser or Ala
  VAR_SEQ 328: note = Gln, Lys, or Glu
  VAR_SEQ 330: note = Tyr or Phe
  VAR_SEQ 331: note = Asn or Asp
  VAR_SEQ 344: note = Ile or Val
  VAR_SEQ 345: note = Arg or Lys
  VAR_SEQ 353: note = Asn, Lys, or Glu
  VAR_SEQ 355: note = Val or Ile
  VAR_SEQ 358: note = Asp or Asn
  VAR_SEQ 372: note = Thr or Ala
  VAR_SEQ 380: note = Tyr or Phe
  VAR_SEQ 381: note = Leu, Ile, or Met
  VAR_SEQ 387: note = Lys, Gly, or Asn
  VAR_SEQ 388: note = Ile, Met, or Phe
  VAR_SEQ 389: note = Glu or Asp
  VAR_SEQ 391: note = Ala, Ser, or Thr
  VAR_SEQ 394: note = Phe or Leu
  VAR_SEQ 395: note = Leu or Ile
  VAR_SEQ 398: note = Ile or Leu
  VAR_SEQ 399: note = Glu, Asn, or Asp
  VAR_SEQ 400: note = Arg or Lys
  VAR_SEQ 402: note = Asp or Asn
  VAR_SEQ 403: note = Phe or Leu
  VAR_SEQ 414: note = Ser or Ala
  VAR_SEQ 417: note = His or Tyr
  VAR_SEQ 419: note = Ile or Leu
  VAR_SEQ 424: note = Met or Leu
  VAR_SEQ 428: note = Ile or Leu
  VAR_SEQ 430: note = Arg, Lys, or Gln
  VAR_SEQ 434: note = Phe or Tyr
  VAR_SEQ 443: note = Asp or Glu
  VAR_SEQ 444: note = Arg or Lys
  VAR_SEQ 446: note = Glu or Lys
  VAR_SEQ 448: note = Leu or Ile
  VAR_SEQ 449: note = Leu or Val
  VAR_SEQ 456: note = Tyr or Phe
  VAR_SEQ 464: note = Lys, Asn, or Gln
  VAR_SEQ 483: note = Phe or Ile
  VAR_SEQ 484: note = Asp or Glu
  VAR_SEQ 485: note = Glu or Asp
  VAR_SEQ 487: note = Val or Ile
  VAR_SEQ 498: note = Asn or Glu
  VAR_SEQ 499: note = Arg or Lys
  VAR_SEQ 509: note = Asn, Glu, or Lys
  VAR_SEQ 510: note = Gln or Glu
  VAR_SEQ 511: note = Lys or Asn
  VAR_SEQ 521: note = Glu or Gln
  VAR_SEQ 523: note = Phe or Tyr
  VAR_SEQ 533: note = Lys or Arg
  VAR_SEQ 534: note = Tyr or Phe
  VAR_SEQ 537: note = Glu or Asp
  VAR_SEQ 544: note = Phe or Tyr
  VAR_SEQ 545: note = Phe or Leu
  VAR_SEQ 548: note = Asn, Glu, Lys, or Gln
  VAR_SEQ 551: note = Gln, Lys, or Glu
  VAR_SEQ 569: note = Leu or Ile
  VAR_SEQ 575: note = Lys, His, or Arg
  VAR_SEQ 577: note = Phe, Ile, or Met
  VAR_SEQ 585: note = Leu or Ile
  VAR_SEQ 588: note = Leu, Val, or Ile
  VAR_SEQ 589: note = Asp or Glu
  VAR_SEQ 597: note = Ala or Ser
  VAR_SEQ 607: note = Lys or Asn
  VAR_SEQ 608: note = Ile or Val
  VAR_SEQ 612: note = Lys or Gln
  VAR_SEQ 613: note = Asp or Glu
  VAR_SEQ 614: note = Phe or Ile
  VAR_SEQ 617: note = Asn or Asp
  VAR_SEQ 623: note = Ile or Met
  VAR_SEQ 624: note = Leu or Ile
  VAR_SEQ 626: note = Asp, Asn, or Glu
  VAR_SEQ 628: note = Val or Ile
  VAR_SEQ 633: note = Leu, Ile, or Val
  VAR_SEQ 637: note = Arg or Lys
  VAR_SEQ 642: note = Lys, Glu, or Gln
  VAR_SEQ 643: note = Arg or Gln
  VAR_SEQ 647: note = Tyr or Phe
  VAR_SEQ 650: note = Leu, Ile, or Val
  VAR_SEQ 651: note = Leu or Phe
  VAR_SEQ 656: note = Val, Met, or Leu
  VAR_SEQ 658: note = Lys or Gln
  VAR_SEQ 663: note = His or Arg
  VAR_SEQ 669: note = Arg or Lys
  VAR_SEQ 673: note = Glu or Lys
  VAR_SEQ 675: note = Ile or Leu
  VAR_SEQ 680: note = Asn or Asp
  VAR_SEQ 681: note = Asn or Asp
  VAR_SEQ 682: note = Glu, Lys, or Gln
  VAR_SEQ 690: note = Tyr or Phe
  VAR_SEQ 701: note = Phe or Leu
  VAR_SEQ 706: note = His or Asn
  VAR_SEQ 711: note = Ser or Thr
  VAR_SEQ 721: note = Val or Ile
  VAR_SEQ 730: note = Leu or Ile
  VAR_SEQ 731: note = Asn, His, Lys, or Gln
  VAR_SEQ 734: note = Val or Ile
  VAR_SEQ 737: note = Ile or Leu
  VAR_SEQ 750: note = Ser or Thr
  VAR_SEQ 751: note = Leu, Val, or Ile
  VAR_SEQ 753: note = Ile or Val
  VAR_SEQ 760: note = Ile or Val
  VAR_SEQ 767: note = Glu or Gln
  VAR_SEQ 769..776: note = RuvC-like domain
  VAR_SEQ 771: note = Val or Ile
  VAR_SEQ 782: note = Gln or Lys
  VAR_SEQ 788: note = Gln or Arg
  VAR_SEQ 794: note = Leu or Ile
  VAR_SEQ 798: note = Ile or Leu
  VAR_SEQ 801: note = Phe or Leu
  VAR_SEQ 804: note = Gln or Lys
  VAR_SEQ 809: note = His or Asn
  VAR_SEQ 818: note = Glu or Asp
  VAR_SEQ 823: note = Gln or Arg
  VAR_SEQ 825: note = Asp, Glu, or Asn
  VAR_SEQ 826: note = Arg or Lys
  VAR_SEQ 828: note = Phe or Tyr
  VAR_SEQ 836: note = Lys or Arg
  VAR_SEQ 842: note = Glu, Gln, or Asp
  VAR_SEQ 843: note = Glu or Asp
  VAR_SEQ 851: note = Gln, Asp, or Asn
  VAR_SEQ 853..879: note = HNH-like domain
  VAR_SEQ 854: note = Ile or Val
  VAR_SEQ 858: note = Ile or Val
  VAR_SEQ 861: note = Ala or Ser
  VAR_SEQ 863: note = Ile or Leu
  VAR_SEQ 866: note = Asn or Asp
  VAR_SEQ 885: note = Asp or Asn
  VAR_SEQ 890: note = Asp or Glu
  VAR_SEQ 891: note = Val or Ile
  VAR_SEQ 893: note = Arg or Lys
  VAR_SEQ 898: note = Tyr or Phe
  VAR_SEQ 901: note = Lys or Gln
  VAR_SEQ 906: note = Lys or Asn
  VAR_SEQ 908: note = Ile or Met
  VAR_SEQ 909: note = Thr or Ser
  VAR_SEQ 910: note = Gln or Lys
  VAR_SEQ 925: note = Thr or Ser
  VAR_SEQ 934: note = Lys, Gln, or His
  VAR_SEQ 946: note = His or Asn
  VAR_SEQ 950: note = Ile or Leu
  VAR_SEQ 954: note = Arg or Lys
  VAR_SEQ 955: note = Phe or Met
  VAR_SEQ 958: note = Glu or Lys
  VAR_SEQ 961: note = Glu or Asp
  VAR_SEQ 962: note = Asn or His
  VAR_SEQ 966: note = Ile, Val, or Met
  VAR_SEQ 967: note = Lys or Arg
  VAR_SEQ 970: note = Arg or Lys
  VAR_SEQ 971: note = Ile or Val
  VAR_SEQ 972: note = Val or Ile
  VAR_SEQ 981: note = Asn, Asp, or Gln
  VAR_SEQ 985: note = Glu, Asp, or Gln
  VAR_SEQ 987: note = Glu or Gln
  VAR_SEQ 988: note = Leu or Phe
  VAR_SEQ 993: note = Asp or Glu
  VAR_SEQ 994: note = Val or Ile
  VAR_SEQ 996: note = Asp or Asn
  VAR_SEQ 997: note = Tyr or Phe
  VAR_SEQ 998..1005: note = RuvC-like domain
  VAR_SEQ 1009: note = Ile or Val
  VAR_SEQ 1012: note = Ala or Thr
  VAR_SEQ 1014: note = Leu or Ile
  VAR_SEQ 1019: note = Gln or Lys
  VAR_SEQ 1032: note = Phe or Tyr
  VAR_SEQ 1036: note = Lys or Arg
  VAR_SEQ 1057: note = Ser or Thr
  VAR_SEQ 1062: note = Phe or Ile
  VAR_SEQ 1071: note = Asp or Asn
  VAR_SEQ 1085: note = Lys or Glu
  VAR_SEQ 1090: note = Ile, Val, or Leu
  VAR_SEQ 1097: note = Ile, Phe, or Leu
  VAR_SEQ 1100: note = Val or Ile
  VAR_SEQ 1101: note = Lys or Arg
  VAR_SEQ 1102: note = Lys or Arg
  VAR_SEQ 1104: note = Met or Leu
  VAR_SEQ 1109: note = Met or Val
  VAR_SEQ 1111: note = Ile or Val
  VAR_SEQ 1122: note = Phe or Leu
  VAR_SEQ 1124: note = Lys or Arg
  VAR_SEQ 1136: note = Ser or Thr
  VAR_SEQ 1145: note = Lys or Glu
  VAR_SEQ 1148: note = Ile or Val
  VAR_SEQ 1171: note = Ala or Ser
  VAR_SEQ 1172: note = Tyr or Phe
  VAR_SEQ 1173: note = Ala, Ser, or Thr
  VAR_SEQ 1174: note = Ile or Val
  VAR_SEQ 1175: note = Leu or Val
  VAR_SEQ 1176: note = Val or Ile
  VAR_SEQ 1188: note = Leu or Ile
  VAR_SEQ 1194: note = Leu, Phe, or Ile
  VAR_SEQ 1197: note = Val or Ile
  VAR_SEQ 1198: note = Thr or Ser
  VAR_SEQ 1200: note = Met or Leu
  VAR_SEQ 1201: note = Glu or Asp
  VAR_SEQ 1202: note = Lys or Arg
  VAR_SEQ 1205: note = Phe or Tyr
  VAR_SEQ 1207: note = Lys or Arg
  VAR_SEQ 1208: note = Asp or Asn
  VAR_SEQ 1216: note = Lys or Gln
  VAR_SEQ 1219: note = Arg or Lys
  VAR_SEQ 1220: note = Gln, Glu, Asp, or Asn
  VAR_SEQ 1226: note = Ile or Leu
  VAR_SEQ 1228: note = Lys or Glu
  VAR_SEQ 1233: note = Ser or Thr
  VAR_SEQ 1235: note = Phe or Tyr
  VAR_SEQ 1236: note = Glu or Lys
  VAR_SEQ 1239: note = Asn, Asp, or Glu
  VAR_SEQ 1242: note = Lys or Arg
  VAR_SEQ 1244: note = Met or Leu
  VAR_SEQ 1259: note = Gln or His
  VAR_SEQ 1263: note = Glu or Gln
  VAR_SEQ 1269: note = His or Lys
  VAR_SEQ 1273: note = Leu or Phe
  VAR_SEQ 1275: note = Tyr or His
  VAR_SEQ 1291: note = Glu, Asn, or Asp
  VAR_SEQ 1293: note = Lys or Asn
  VAR_SEQ 1297: note = Tyr or Phe
  VAR_SEQ 1298: note = Ile or Val
  VAR_SEQ 1299: note = Glu or Asp
  VAR_SEQ 1301: note = Asn or His
  VAR_SEQ 1302: note = Lys or Arg
  VAR_SEQ 1305: note = Leu or Phe
  VAR_SEQ 1308: note = Leu or Ile
  VAR_SEQ 1309: note = Leu, Ile, or Phe
  VAR_SEQ 1312: note = Val or Ile
  VAR_SEQ 1314: note = Asn or Glu
  VAR_SEQ 1317: note = Lys or Glu
  VAR_SEQ 1329: note = Ile, Val, or Leu
  VAR_SEQ 1333: note = Tyr or Phe
  VAR_SEQ 1341: note = Leu or Ile
  VAR_SEQ 1348: note = Phe or Ile
  VAR_SEQ 1349: note = Ile or Val
  VAR_SEQ 1360: note = Leu, Phe, or Met
  VAR_SEQ 1362: note = Phe or Leu
  VAR_SEQ 1367: note = Ala or Ser
  VAR_SEQ 1372: note = Lys or Glu
  VAR_SEQ 1373: note = Phe or Tyr
  VAR_SEQ 1374: note = Phe or Leu
  VAR_SEQ 1390: note = Leu, Val, or Ile
  VAR_SEQ 1392: note = Asn or Asp
  VAR_SEQ 1393: note = Ser or Ala
  VAR_SEQ 1395: note = Ile or Leu
  VAR_SEQ 1397: note = His or Tyr
  VAR_SEQ 1400: note = Ile or Val
  VAR_SEQ 1406: note = Thr or Ser
  VAR_SEQ 1: note = Any amino acid
  VAR_SEQ 3: note = Any amino acid
  VAR_SEQ 20: note = Any amino acid
  VAR_SEQ 25: note = Any amino acid
  VAR_SEQ 27: note = Any amino acid
  VAR_SEQ 28: note = Any amino acid
  VAR_SEQ 34: note = Any amino acid
  VAR_SEQ 38: note = Any amino acid
  VAR_SEQ 40: note = Any amino acid
  VAR_SEQ 41: note = Any amino acid
  VAR_SEQ 47: note = Any amino acid
  VAR_SEQ 49: note = Any amino acid
  VAR_SEQ 50: note = Any amino acid
  VAR_SEQ 54: note = Any amino acid
  VAR_SEQ 56: note = Any amino acid
  VAR_SEQ 59..61: note = Any amino acid
  VAR_SEQ 64: note = Any amino acid
  VAR_SEQ 71: note = Any amino acid
  VAR_SEQ 72: note = Any amino acid
  VAR_SEQ 79: note = Any amino acid
  VAR_SEQ 83: note = Any amino acid
  VAR_SEQ 87: note = Any amino acid
  VAR_SEQ 90..92: note = Any amino acid
  VAR_SEQ 94: note = Any amino acid
  VAR_SEQ 95: note = Any amino acid
  VAR_SEQ 98: note = Any amino acid
  VAR_SEQ 101: note = Any amino acid
  VAR_SEQ 105: note = Any amino acid
  VAR_SEQ 107: note = Any amino acid
  VAR_SEQ 112: note = Any amino acid
  VAR_SEQ 113: note = Any amino acid
  VAR_SEQ 119..120: note = Any amino acid
  VAR_SEQ 122: note = Any amino acid
  VAR_SEQ 125..126: note = Any amino acid
  VAR_SEQ 129: note = Any amino acid
  VAR_SEQ 140: note = Any amino acid
  VAR_SEQ 142: note = Any amino acid
  VAR_SEQ 144..146: note = Any amino acid
  VAR_SEQ 148: note = Any amino acid
  VAR_SEQ 172: note = Any amino acid
  VAR_SEQ 175..179: note = Any amino acid
  VAR_SEQ 182..183: note = Any amino acid
  VAR_SEQ 185: note = Any amino acid
  VAR_SEQ 189..190: note = Any amino acid
  VAR_SEQ 193..194: note = Any amino acid
  VAR_SEQ 196..211: note = Any amino acid
  VAR_SEQ 213..215: note = Any amino acid
  VAR_SEQ 218..219: note = Any amino acid
  VAR_SEQ 224..225: note = Any amino acid
  VAR_SEQ 227: note = Any amino acid
  VAR_SEQ 229: note = Any amino acid
  VAR_SEQ 232..234: note = Any amino acid
  VAR_SEQ 236: note = Any amino acid
  VAR_SEQ 239..240: note = Any amino acid
  VAR_SEQ 242: note = Any amino acid
  VAR_SEQ 244: note = Any amino acid
  VAR_SEQ 248: note = Any amino acid
  VAR_SEQ 250: note = Any amino acid
  VAR_SEQ 253..255: note = Any amino acid
  VAR_SEQ 259..260: note = Any amino acid
  VAR_SEQ 264: note = Any amino acid
  VAR_SEQ 266: note = Any amino acid
  VAR_SEQ 268: note = Any amino acid
  VAR_SEQ 270..271: note = Any amino acid
  VAR_SEQ 282: note = Any amino acid
  VAR_SEQ 285..286: note = Any amino acid
  VAR_SEQ 297: note = Any amino acid
  VAR_SEQ 301..303: note = Any amino acid
  VAR_SEQ 309: note = Any amino acid
  VAR_SEQ 312: note = Any amino acid
  VAR_SEQ 314..317: note = Any amino acid
  VAR_SEQ 321: note = Any amino acid
  VAR_SEQ 332: note = Any amino acid
  VAR_SEQ 334..335: note = Any amino acid
  VAR_SEQ 338..339: note = Any amino acid
  VAR_SEQ 342..343: note = Any amino acid
  VAR_SEQ 346..351: note = Any amino acid
  VAR_SEQ 357: note = Any amino acid
  VAR_SEQ 359..360: note = Any amino acid
  VAR_SEQ 362: note = Any amino acid
  VAR_SEQ 371: note = Any amino acid
  VAR_SEQ 373: note = Any amino acid
  VAR_SEQ 375..376: note = Any amino acid
  VAR_SEQ 379: note = Any amino acid
  VAR_SEQ 383..384: note = Any amino acid
  VAR_SEQ 386: note = Any amino acid
  VAR_SEQ 392..393: note = Any amino acid
  VAR_SEQ 396: note = Any amino acid
  VAR_SEQ 422: note = Any amino acid
  VAR_SEQ 425: note = Any amino acid
  VAR_SEQ 429: note = Any amino acid
  VAR_SEQ 432..433: note = Any amino acid
  VAR_SEQ 439..440: note = Any amino acid
  VAR_SEQ 442: note = Any amino acid
  VAR_SEQ 447: note = Any amino acid
  VAR_SEQ 462: note = Any amino acid
  VAR_SEQ 466: note = Any amino acid
  VAR_SEQ 470..471: note = Any amino acid
  VAR_SEQ 474..477: note = Any amino acid
  VAR_SEQ 479: note = Any amino acid
  VAR_SEQ 486: note = Any amino acid
  VAR_SEQ 489..491: note = Any amino acid
  VAR_SEQ 494..495: note = Any amino acid
  VAR_SEQ 502..503: note = Any amino acid
  VAR_SEQ 505..506: note = Any amino acid
  VAR_SEQ 519: note = Any amino acid
  VAR_SEQ 522: note = Any amino acid
  VAR_SEQ 524: note = Any amino acid
  VAR_SEQ 535..536: note = Any amino acid
  VAR_SEQ 538..543: note = Any amino acid
  VAR_SEQ 546: note = Any amino acid
  VAR_SEQ 547: note = Any amino acid
  VAR_SEQ 549: note = Any amino acid
  VAR_SEQ 552: note = Any amino acid
  VAR_SEQ 554..557: note = Any amino acid
  VAR_SEQ 560..561: note = Any amino acid
  VAR_SEQ 565..568: note = Any amino acid
  VAR_SEQ 570..574: note = Any amino acid
  VAR_SEQ 576: note = Any amino acid
  VAR_SEQ 578..584: note = Any amino acid
  VAR_SEQ 586: note = Any amino acid
  VAR_SEQ 590..594: note = Any amino acid
  VAR_SEQ 599..600: note = Any amino acid
  VAR_SEQ 606: note = Any amino acid
  VAR_SEQ 609..611: note = Any amino acid
  VAR_SEQ 618..619: note = Any amino acid
  VAR_SEQ 621..622: note = Any amino acid
  VAR_SEQ 629..630: note = Any amino acid
  VAR_SEQ 638: note = Any amino acid
  VAR_SEQ 641: note = Any amino acid
  VAR_SEQ 645..646: note = Any amino acid
  VAR_SEQ 648..649: note = Any amino acid
  VAR_SEQ 652..655: note = Any amino acid
  VAR_SEQ 660: note = Any amino acid
  VAR_SEQ 672: note = Any amino acid
  VAR_SEQ 676: note = Any amino acid
  VAR_SEQ 684: note = Any amino acid
  VAR_SEQ 685: note = Any amino acid
  VAR_SEQ 692..693: note = Any amino acid
  VAR_SEQ 695..697: note = Any amino acid
  VAR_SEQ 708..709: note = Any amino acid
  VAR_SEQ 714..815: note = Any amino acid
  VAR_SEQ 717: note = Any amino acid
  VAR_SEQ 719: note = Any amino acid
  VAR_SEQ 722..729: note = Any amino acid
  VAR_SEQ 732..733: note = Any amino acid
  VAR_SEQ 735..736: note = Any amino acid
  VAR_SEQ 738: note = Any amino acid
  VAR_SEQ 759: note = Any amino acid
  VAR_SEQ 763..765: note = Any amino acid
  VAR_SEQ 768..769: note = Any amino acid
  VAR_SEQ 781: note = Any amino acid
  VAR_SEQ 784..785: note = Any amino acid
  VAR_SEQ 789: note = Any amino acid
  VAR_SEQ 791: note = Any amino acid
  VAR_SEQ 793: note = Any amino acid
  VAR_SEQ 795..797: note = Any amino acid
  VAR_SEQ 810..817: note = Any amino acid
  VAR_SEQ 820..821: note = Any amino acid
  VAR_SEQ 840..841: note = Any amino acid
  VAR_SEQ 847..848: note = Any amino acid
  VAR_SEQ 864..871: note = Any amino acid
  VAR_SEQ 874..875: note = Any amino acid
  VAR_SEQ 877..878: note = Any amino acid
  VAR_SEQ 881: note = Any amino acid
  VAR_SEQ 883: note = Any amino acid
  VAR_SEQ 888..889: note = Any amino acid
  VAR_SEQ 895: note = Any amino acid
  VAR_SEQ 897: note = Any amino acid
  VAR_SEQ 900: note = Any amino acid
  VAR_SEQ 903..905: note = Any amino acid
  VAR_SEQ 915: note = Any amino acid
  VAR_SEQ 926..927: note = Any amino acid
  VAR_SEQ 931: note = Any amino acid
  VAR_SEQ 949: note = Any amino acid
  VAR_SEQ 952..953: note = Any amino acid
  VAR_SEQ 957: note = Any amino acid
  VAR_SEQ 959: note = Any amino acid
  VAR_SEQ 963..965: note = Any amino acid
  VAR_SEQ 968: note = Any amino acid
  VAR_SEQ 977: note = Any amino acid
  VAR_SEQ 1007: note = Any amino acid
  VAR_SEQ 1010..1011: note = Any amino acid
  VAR_SEQ 1015..1016: note = Any amino acid
  VAR_SEQ 1022: note = Any amino acid
  VAR_SEQ 1030..1031: note = Any amino acid
  VAR_SEQ 1033..1035: note = Any amino acid
  VAR_SEQ 1037..1046: note = Any amino acid
  VAR_SEQ 1048: note = Any amino acid
  VAR_SEQ 1051: note = Any amino acid
  VAR_SEQ 1053..1054: note = Any amino acid
  VAR_SEQ 1061: note = Any amino acid
  VAR_SEQ 1064..1070: note = Any amino acid
  VAR_SEQ 1072..1084: note = Any amino acid
  VAR_SEQ 1086: note = Any amino acid
  VAR_SEQ 1089: note = Any amino acid
  VAR_SEQ 1092: note = Any amino acid
  VAR_SEQ 1094..1096: note = Any amino acid
  VAR_SEQ 1098..1099: note = Any amino acid
  VAR_SEQ 1106..1107: note = Any amino acid
  VAR_SEQ 1115: note = Any amino acid
  VAR_SEQ 1117: note = Any amino acid
  VAR_SEQ 1119..1121: note = Any amino acid
  VAR_SEQ 1123: note = Any amino acid
  VAR_SEQ 1125..1135: note = Any amino acid
  VAR_SEQ 1137..1138: note = Any amino acid
  VAR_SEQ 1141: note = Any amino acid
  VAR_SEQ 1146: note = Any amino acid
  VAR_SEQ 1149..1150: note = Any amino acid
  VAR_SEQ 1152..1157: note = Any amino acid
  VAR_SEQ 1159..1160: note = Any amino acid
  VAR_SEQ 1165..1170: note = Any amino acid
  VAR_SEQ 1177..1181: note = Any amino acid
  VAR_SEQ 1184..1186: note = Any amino acid
  VAR_SEQ 1189..1193: note = Any amino acid
  VAR_SEQ 1195..1196: note = Any amino acid
  VAR_SEQ 1203..1204: note = Any amino acid
  VAR_SEQ 1206: note = Any amino acid
  VAR_SEQ 1209..1211: note = Any amino acid
  VAR_SEQ 1214..1215: note = Any amino acid
  VAR_SEQ 1221..1225: note = Any amino acid
  VAR_SEQ 1227: note = Any amino acid
  VAR_SEQ 1237..1238: note = Any amino acid
  VAR_SEQ 1241: note = Any amino acid
  VAR_SEQ 1248..1256: note = Any amino acid
  VAR_SEQ 1258: note = Any amino acid
  VAR_SEQ 1264..1265: note = Any amino acid
  VAR_SEQ 1267..1268: note = Any amino acid
  VAR_SEQ 1270..1272: note = Any amino acid
  VAR_SEQ 1276: note = Any amino acid
  VAR_SEQ 1278..1290: note = Any amino acid
  VAR_SEQ 1292: note = Any amino acid
  VAR_SEQ 1294..1296: note = Any amino acid
  VAR_SEQ 1300: note = Any amino acid
  VAR_SEQ 1303..1304: note = Any amino acid
  VAR_SEQ 1306: note = Any amino acid
  VAR_SEQ 1310..1311: note = Any amino acid
  VAR_SEQ 1316: note = Any amino acid
  VAR_SEQ 1318..1321: note = Any amino acid
  VAR_SEQ 1323..1324: note = Any amino acid
  VAR_SEQ 1326..1328: note = Any amino acid
  VAR_SEQ 1330..1332: note = Any amino acid
  VAR_SEQ 1334..1340: note = Any amino acid
  VAR_SEQ 1342..1347: note = Any amino acid
  VAR_SEQ 1350..1358: note = Any amino acid
  VAR_SEQ 1361: note = Any amino acid
  VAR_SEQ 1363..1365: note = Any amino acid
  VAR_SEQ 1368: note = Any amino acid
  VAR_SEQ 1370: note = Any amino acid
  VAR_SEQ 1375..1377: note = Any amino acid
  VAR_SEQ 1379: note = Any amino acid
  VAR_SEQ 1381: note = Any amino acid
  VAR_SEQ 1383: note = Any amino acid
  VAR_SEQ 1385..1389: note = Any amino acid
  VAR_SEQ 1391: note = Any amino acid
  VAR_SEQ 1408..1409: note = Any amino acid
  VAR_SEQ 1411..1416: note = Any amino acid
  VAR_SEQ 1144: note = any amino acid
XKXYXIGLDIGTNSVGWAVXTDXYXXXXXKXKXXGXXXXXXIXKNXXGXXLFDXGXTAXXXRXXRTARRRXXRRXNRIXYLQXIFXXEMXXXDXXFFXRLXXSFXVXXXKXXXXXPXFXXXXXEXXYHXXXPTIYHLRXXLXXXXXKXDLRLXYLALAHXIKXRGNFLIEGXXXXXNXXXXXXXXXXXXXYXXXFXXXXXXXXXXXXXXXXXXXXIXXXXXXXXXXXXXXXXXXPXEKXXGXFXXXXXLXXGXXXXFXXXFXLXEXXXXXXXKXXYXXXLXXLLXXIGDXYXXXFXXAKXXXXXXXLSXXXXVXXXXTXAXLSXXMIXRXXXHXXDLXXLKXXXXXXXXXXYXEXFXXXXKXGYAGYIDGXXXQXXFYXXXKXXLXXXXGXXXXXXKXXXEXXLRKQRTFDNGXIPXQXHLXEXXAIXXXQXXXYPFLXXNXXXIXXXXTFRIPYXVGPLAXGXSXFAWXXRKXXXXIXPWNXXXXXDXXXSAXXFIXXMTXXDXXLPXXXVLPKHSLXYXXXXVYNELTKVXXXXXXXXXXXXXXXXXKXXIXXXXFKXXRKVXXXXXXXXXXXXXXXXXXXXXXGXXXXXXXFNXSXXTYHDLXXXXXXXXXLDXXXNXXXXEXIXXXLTXFEDXXMIXXXLXXXXXXXXXXXXKXLXRRXYTGWGXLSXXLXXGIRXXXSXXTILDXLXXDXXXNRNXMQLIXDXXLXFKXXIXKXQXXXXXXXXXXXXXXXXXXGSPAIKKGILQXXKXVDELVXXMGXXXPXXIVXEMARENQXTXXGXXNSXXRXKXXXXXXKEXGSXILKEXXXXXXXXXXNXXLXNXXLXLYYLQNGXDMYXXXXLDIXXLSXYDXDHIXPQXFXXDXSIDNXVLXXSXXNRXKXDXVPXXXXVXKXKXXWXXLXXXXLXXXRKFDXLTKAERGGLXXXDKAXFIXRQLVETRQITKXVAXXLXXXXNXXXDXXXXXXXXVXXXTLKSXLVSXFRKXFXXLYKVXXNXXHHAHDAYLNXVXXXXLXXXYPXLEXEFVYGDYXXXXXXXXXXXXXXXXXKXATXKXXFYXNIMXXFXXXXXXXXXXXXXXXXXXXXXXXGEXXWXKXXXXXXXXXVXMXXQXNXVKKXEXQXXXXXXXXXXXXXXXXXXXXPKXNSXXXLXXXKXXXXXXDXXKYGGXXXXXXXXXXXXXXXXXKGXXXKXXXXXXXXXXXXXXXXXXXXXXXXFLXXXGYXXXXXXXXXXLPKYXLXXXXXGXXRXLASXXXXXXXXXEXXKGNXXXLXXXXXXXLXXAXXXXXXXXXXXXXXXXXXXXXXXXXXXXXEXXXXXXXFXXXXXXAXXNXXXXXXXXXXXXXXXXXXXXXXXXXXXXXXXXXLXXXXXXGXXAXFXXXXXXIXRXRXYXXXXXXXXXTXIXQSXTGLYEXRXXLXXXXXX
